(19) United States
(12) Patent Application Publication
(10) Pub. No.: US 2015/0105276 A1
(43) Pub. Date: Apr. 16, 2015

(54) BLOOD-BASED GENE DETECTION OF NON-SMALL CELL LUNG CANCER

(71) Applicants: RHEINISCHE FRIEDRICH-WILHELMS-UNIVERSITAT BONN, Bonn (DE); UNIVERSITAT ZU KOLN, Koln (DE)

(72) Inventors: Andrea HOFMANN, Bonn (DE); Joachim L. Schultze, Konigswinter (DE); Andrea Staratschek-Jox, Koln (DE); Jurgen Wolf, Koln (DE); Thomas Zander, Bonn (DE)

(21) Appl. No.: 14/339,896

(22) Filed: Jul. 24, 2014

Related U.S. Application Data
(63) Continuation of application No. 14/115,565, now abandoned.

(30) Foreign Application Priority Data
May 2, 2011 (EP) 11164480.3

(51) Int. Cl. C12Q 1/68

(52) U.S. Cl. CPC C12Q 1/6886; C12Q 2600/158
USPC 506/9; 506/16

(57) ABSTRACT

The present invention provides a method for early detection of non-small cell lung cancer based on the abundance of RNAs from blood samples as well as diagnostic tools such as kits and arrays suitable for such method.

[0001] The present invention pertains to a method for the detection of non-small cell lung cancer (NSCLC) based on the abundance of particular RNAs from blood samples, as well as diagnostic tools such as kits and arrays suitable for such method.

### BACKGROUND OF THE INVENTION

[0002] Lung cancer is still the leading cause of cancer related death worldwide. Prognosis has remained poor with a disastrous two-year survival rate of only about 15% due to diagnosis of the disease in late, i.e. incurable stages in the majority of patients (Jemal, A. et al., CA Cancer J. Clin., 58: 71-96 (2008)) and still disappointing therapeutic regimens in advanced disease (Sandler, A. et al., N. Engl. J. Med., 355: 2542-50 (2006)). Thus, there is an urgent need to establish reliable tools for the identification of non-small cell lung cancer (NSCLC) patients at early stages of the disease e.g. prior to the development of clinical symptoms. Today, the only way to detect non-small cell lung cancer is by means of imaging technologies detecting morphological changes in the lung in combination with biopsy specimens taken for histological examination. However, these screening approaches are not easily applied to secondary prevention of non-small cell lung cancer in an asymptomatic population (Henschke, C. I. et al., N. Engl. J. Med., 355: 1763-71 (2006)).

[0003] The use of surrogate tissue-based, e.g. blood-based, biomarkers for non-small cell lung cancer might therefore circumvent the known pitfalls of imaging technologies and invasive diagnostics ((Henschke, C. I. et al., N. Engl. J. Med., 355: 1763-71 (2006); Bach, P. B. et al., Chest, 132: 69S-77S (2007)). Such biomarkers might be utilized to direct imaging based and invasive screening approaches to only those individuals identified as potential non-small cell lung cancer patients by biomarker screening.

[0004] Array-based assessment of disease-specific gene expression patterns in peripheral blood mononuclear cells (PBMC) have been reported for non-malignant (Staratschek-Jox, A. et al., Expert Review of Molecular Diagnostics, 9: 271-80 (2009)) and malignant diseases including renal cell carcinoma, melanoma, bladder, breast and lung cancer (Burczynski, M. E. et al., Clin. Cancer Res., 11: 1181-9 (2005); Twine, N. C. et al., Cancer Res., 63: 6069-75 (2003); Sharma, P. et al., Breast Cancer Res., 7: R634-44 (2005); Osman, I. et al., Clin. Cancer Res., 12:3374-80 (2006); Critchley-Thorne, R. J. et al., PLoS Med., 4: e176 (2007); Showe, M. K. et al., Cancer Res., 69: 9202-10 (2009)). In some cases, gene expression profiles derived from PBMC were even suggested as promising tools for early detection (Sharma, P. et al., Breast Cancer Res., 7: R634-44 (2005); Showe, M. K. et al., Cancer Res., 69: 9202-10 (2009)) or prediction of prognosis (Burczynski, M. E. et al., Clin. Cancer Res., 11: 1181-9 (2005)), albeit these findings have not yet been validated in independent studies. Furthermore, circumventing known pitfalls of analyzing PBMC in a clinical setting (Debey, S. et al., Pharmacogenomics J., 4: 193-207 (2004); Debey, S. et al., Genomics, 87: 653-64 (2006)) by using stabilized RNA derived from whole blood would further strengthen the validity of blood-based surrogate biomarkers for early diagnosis of lung cancer and other malignant diseases.

### DESCRIPTION OF THE INVENTION

[0005] The inventors have shown for the first time that measuring the abundance of a set of at least 5 different RNAs, possibly stemming from the transcription of genes, from a sample of whole blood allows for a highly accurate prediction of whether a human individual suffers from non-small cell lung cancer or not. Thus, a means for detecting or diagnosing non-small cell lung cancer is provided that is based on a minimally invasive method such as drawing a blood sample from a patient.

[0006] In this context, the invention teaches a test system that is trained in detection of a non-small cell lung cancer, comprising at least 5 RNAs, which can be quantitatively measured on an adequate set of training samples, with adequate clinical information on carcinoma status, applying adequate quality control measures, and on an adequate set of test samples, for which the detection yet has to be made. Given the quantitative values for the biomarkers and the clinical data for the training, a classifier can be trained and applied to the test samples to calculate the probability of the presence of the non-small cell lung cancer. The 484 RNAs of the invention are defined in particular in table 2 and are characterized through their nucleotide sequence or further through synonymous probe IDs provided in table 2. It is noted that the abundance of a particular RNA may be determined using different probe IDs, as known in the art.

[0007] Therefore, the inventors provide a means for diagnosing or detecting NSCLC in a human individual with a sensitivity and specificity (as shown e.g. by the area under the curve (AUC) values in lists 1 to 51), as it has thus far not yet been described for a blood-based method.

[0008] In a first aspect, the invention provides a method for the detection of non-small cell lung cancer (NSCLC) of any clinical stage in a human individual based on RNA obtained from a blood sample obtained from the individual. Such a method comprises at least the following two steps: Firstly, the abundance of at least 5 RNAs that are chosen from the RNAs listed in Table 2 is determined in the sample. Secondly, based on the measured abundance, it is concluded whether the patient has NSCLC or not.

[0009] In preferred embodiments of the invention, the abundance of at least 6 RNAs, of at least 7 RNAs, of at least 11 RNAs, of at least 16 RNAs, of at least 21 RNAs, of at least 25 RNAs, or of at least 34 RNAs that are chosen from the RNAs listed in Table 2 is determined, respectively. Reference is made in this context to lists 1 to 51, which show exemplary embodiments of sets of RNAs whose abundance can be measured in the method of the invention. For each set of RNAs, the AUC is provided, which is a quantitative parameter for the clinical utility (specificity and sensitivity) of the invention.

[0010] In a preferred embodiment of this method, it comprises determining the abundance of the RNAs specified in FIG. 2B.

[0011] In further preferred embodiments of the invention, the abundance of at least 5 RNAs from the RNAs listed in Table 2 is measured, wherein at least one RNA that is chosen from the group consisting of SEQ ID NOs:72 (PLSCR1), 85 (VPREB3), 99 (NT5C2), 146 (BTN3A2), 183 (ANKMY1) and 283 (BLR1) is excluded from the measurement. In preferred embodiments, at least two RNAs that are chosen from the group consisting of SEQ ID NOs:72, 85, 99, 146, 183 and 283, or all six RNAs from the group consisting of SEQ ID NOs:72, 85, 99, 146, 183 and 283 are not measured. In the latter case the abundance of at least 5 RNAs is measured that are listed in Table 2 and that are chosen from the group consisting of SEQ ID NOs: 1-71, 73-84, 86-98, 100-145, 147-182, 184-282 and 284-484. It is understood that the embodiments of the method of the invention that avoid the determination of the abundance one or more of the RNAs of SEQ ID NOs:72, 85, 99, 146, 183 and 283 are at least equally sensitive as those including the determination of said RNAs. An RNA obtained from an individual's blood sample, i.e. an RNA biomarker, is an RNA molecule with a particular base sequence whose presence within a blood sample from a human individual can be quantitatively measured. The RNA can e.g. be mRNA, cDNA, unspliced RNA, or fragments of any of the before mentioned molecules.

[0012] The term “abundance” refers to the amount of RNA in a sample of a given size. In a preferred embodiment, the term “abundance” is equivalent to the term “expression level”. The term “whole blood” refers to a sample of blood taken from a human individual for which no separation of particular fractions of the blood is performed. In particular, no separation of a certain type of blood cell or of blood cells in general needs to be performed, since the whole blood sample is used in the present invention. This allows for easier handling and shipping of the blood samples compared to methods in which the blood sample is separated into different fractions.

[0013] Lung Cancer is subdivided into two major histological and clinical groups: Small Cell Lung Cancer and Non Small Cell Lung Cancer (WHO Lung Cancer classification, Travis et al., IARC Press 2004). The UICC based staging system has recently been revised. All data obtained for this study were based on the UICC based staging system version 6 (Travis et al., JTO 2008).

[0014] The conclusion whether the patient has NSCLC or not may comprise, in a preferred embodiment of the method, classifying the sample as being from a healthy individual or from an individual having NSCLC based on the specific difference of the abundance of the at least 5 RNAs in healthy individuals versus the abundance of the at least 5 RNAs in individuals with NSCLC in a reference set. In the present method, a sample can be classified as being from a patient with NSCLC or from a healthy individual without the necessity to run a reference sample of known origin (i.e. from an NSCLC patient or a healthy individual) at the same time.

[0015] In a preferred embodiment the method of the invention is a method for the detection of NSCLC in a human individual based on RNA obtained from a blood sample obtained from the individual, comprising:
[0016] determining the abundance of at least 5 RNAs in the sample that are chosen from the RNAs listed in Table 2, and
[0017] classifying the sample as being from a healthy individual or from an individual having NSCLC based on the specific difference of the abundance of the at least 5 RNAs in healthy individuals versus the abundance of the at least 5 RNAs in individuals with NSCLC. Particularly preferred for this method is that the abundance of at least 7 RNAs, of at least 11 RNAs, of at least 16 RNAs, of at least 21 RNAs, of at least 25 RNAs, or of at least 34 RNAs chosen from the RNAs listed in Table 2 is determined.

[0018] The conclusion or test result whether the individual has NSCLC or not is preferably reached on the basis of a classification algorithm, such as a support vector machine, a random forest method, or a K-nearest neighbor method, as known in the art. The conclusion or test result whether the individual has NSCLC or not is preferably reached on the basis of a classification algorithm, such as a support vector machine, as known in the art.

[0019] For the development of a model that allows for the classification for a given set of biomarkers, such as RNAs, only those methods are needed that are generally known to a person of skill in the art.

[0020] The major steps of such a model are:

1) condensation of the raw measurement data (for example combining probes of a microarray to probeset data, and/or normalizing measurement data against common controls);
2) training and applying a classifier (i.e. a mathematical model that generalizes properties of the different classes (NSCLC vs. healthy individual) from the training data and applies them to the test data resulting in a classification for each test sample.

[0021] The key component of these classifier training and classification techniques is the choice of RNA biomarkers that are used as input to the classification algorithm.

[0022] The classification is in one embodiment achieved by applying a Prediction Method for Support Vector Machines (hereinafter SVM; David Meyer based on C++-code by Chih-Chung Chang and Chih-Jen Lin), which predicts values based upon a model trained by svm.

### Usage:

[0023] ## S3 method for class ‘svm’:
predict(object, newdata, decision.values=FALSE,
probability=FALSE, . . . , na.action=na.omit)

### Arguments:

[0024] Object Object of class “svm”, created by svm.
[0025] Newdata A matrix containing the new input data. A vector will be transformed to a n×1 matrix.
[0026] decision.values Logical controlling whether the decision values of all binary classifiers computed in multiclass classification shall be computed and returned.
[0027] Probability Logical indicating whether class probabilities should be computed and returned. Only possible if the model was fitted with the probability option enabled.
[0028] na.action A function to specify the action to be taken if ‘NA’s are found. The default action is na.omit, which leads to rejection of cases with missing values on any required variable. An alternative is na.fail, which causes an error if NA cases are found. (NOTE: If given, this argument must be named.)
[0029] . . . Currently not used.

[0030] A vector of predicted values (for classification: a vector of labels, for density estimation: a logical vector). If decision.value is TRUE, the vector gets a “decision.values” attribute containing a n×c matrix (n number of predicted values, c number of classifiers) of all c binary classifiers' decision values. There are k*(k−1)/2 classifiers (k number of classes). The colnames of the matrix indicate the labels of the two classes. If probability is TRUE, the vector gets a “probabilities” attribute containing a n×k matrix (n number of predicted values, k number of classes) of the class probabilities.

[0031] If the training set was scaled by svm (done by default), the new data is scaled accordingly using scale and center of the training data.

[0032] The specific SVM algorithm suitable for the method of the invention is shown in Table 3.

[0033] The determination of the expression profiles of the RNAs described herein is performed in a blood-based fashion. In particular, blood samples are used in the method of the invention. Methods for determining the expression profiles therefore comprise e.g. in situ hybridization, PCR-based methods, sequencing, or preferably microarray-based methods.

[0034] The conclusion of a sample as stemming from a healthy individual or from an individual with NSCLC is based on increases or decreases in the abundance of the RNAs in the sample compared to reference values. Specifically, an increase of the abundance preferably provides for a change of >1.1, >1.2, or >1.3. A decrease of the expression preferably provides for a change <0.9, <0.8, or <0.7 relative to the respective expression in healthy individuals.

[0035] The abundance can e.g. be determined with an RNA hybridization assay, preferably with a solid phase hybridization array (microarray), or with a real-time polymerase chain reaction, or through sequencing. Preferably, the abundance of the at least 5 RNAs of Table 2 is determined through a hybridization with probes. Such a probe may comprise 12 to 150, preferably 25 to 70 consecutive nucleotides with a sequence that is reverse complementary to at least part of the RNA whose abundance is to be determined, such that a specific hybridization between the probe and the RNA whose abundance is to be determined can occur.

[0036] In another aspect, the invention refers to a solid phase hybridization array (microarray) for the detection of NSCLC based on a blood sample from a human individual. Such an array comprising probes for detecting at least 5 of the RNAs that are chosen from the RNAs listed in Table 2. Preferably, the array comprises probes for detecting at least 6 RNAs, of at least 7 RNAs, of at least 11 RNAs, of at least 16 RNAs, of at least 21 RNAs, of at least 25 RNAs, or of at least 34 RNAs that are chosen from the RNAs listed in Table 2, respectively. It is further preferred that said probes for detecting said at least 5 RNAs from the RNAs listed in Table 2 exclude probes for detecting one, or two, or all six of the RNAs that is chosen from the group consisting of SEQ ID NOs:72, 85, 99, 146, 183 and 283. In particularly preferred embodiments, the probes for detecting the at least 5 RNAs as listed in Table 2 are chosen from the group consisting of SEQ ID NOs: 1-71, 73-84, 86-98, 100-145, 147-182, 184-282 and 284-484.

[0037] A microarray includes a specific set of probes, such as oligonucleotides and/or cDNA's (e.g. ESTs) corresponding in whole or in part, and/or continuously or discontinuously, to regions of RNAs that can be extracted from a blood sample of a human individual; wherein the probes are localized onto a support. The probes can correspond in sequence to the RNAs of the invention such that hybridization between the RNA from the individual and the probe occurs, yielding a detectable signal. This signal can be detected and together with its location on the support can be used to determine which probe hybridized with RNA from the individual's blood sample.

[0038] In another aspect, the invention refers to the use of a hybridization array as described above and herein for the detection of NSCLC in a human individual based on RNA from a blood sample obtained from the individual, comprising determining the abundance of at least 5 RNAs, preferably at least 7 RNAs, stemming from the 484 genes listed in Table 2 in the sample.

[0039] In another aspect, the invention refers to a kit for the detection of NSCLC, comprising means for determining the abundance of at least 5, preferably at least 7 out of 484 RNAs in the sample that are chosen from the RNAs listed in table 2. Preferably said kit comprises means for determining the abundance of at least 5 RNAs chosen from the RNAs listed in Table 2, wherein the means for determining one, or two, or all six of the RNAs that is chosen from the group consisting of SEQ ID NOs:72, 85, 99, 146, 183 and 283 are excluded. In particularly preferred embodiments, the kit comprises means for determining the abundance of at least 5 RNAs as listed in Table 2 that are chosen from the group consisting of SEQ ID NOs: 1-71, 73-84, 86-98, 100-145, 147-182, 184-282 and 284-484.

[0040] Such a kit may comprise probes and/or a microarray as described above and herein. Specifically, the kit preferably comprises probes, which in turn comprise 15 to 150, preferably 30 to 70 consecutive nucleotides with a reverse complementary sequence to the at least 5 RNAs (or more, as disclosed above and herein) whose abundance is to be determined. Alternatively, the kit preferably comprises a microarray comprising probes with a reverse complementary sequence to the at least 5 RNAs whose abundance is to be determined. Optionally, the kit may further comprise a mixture of at least 5 of the RNAs of table 2 in a given amount or concentration for use as a standard and/or other components, such as solvents, buffers, labels, primers and/or reagent.

[0041] The expression profile of the herein disclosed at least 5 RNAs (or more, as disclosed above and herein) is determined, preferably through the measurement of the quantity of the mRNA of the marker gene. This quantity of the mRNA of the marker gene can be determined for example through chip technology (microarray), (RT-) PCR (for example also on fixated material), Northern hybridization, dot-blotting, sequencing, or in situ hybridization.

[0042] The microarray technology, which is most preferred, allows for the simultaneous measurement of RNA abundance of up to many thousand gene products and is therefore an important tool for determining differential expression in this context, in particular between two biological samples or groups of biological samples. As will be understood by a person of skill in the art, the analysis can also be performed through single reverse transcriptase-PCR, competitive PCR, real time PCR, differential display RT-PCR, Northern blot analysis, sequencing, and other related methods. In general, the larger the number of markers is that are to be measured, the more preferred is the use of the microarray technology.

[0043] Measurements can be performed using the complementary DNA (cDNA) or complementary RNA (cRNA), which is produced on the basis of the RNA to be analyzed, e.g. using microarrays. A great number of different arrays as well as their manufacture are known to a person of skill in the art and are described for example in the U.S. Pat. Nos. 5,445,934; 5,532,128; 5,556,752; 5,242,974; 5,384,261; 5,405,783; 5,412,087; 5,424,186; 5,429,807; 5,436,327; 5,472,672; 5,527,681; 5,529,756; 5,545,331; 5,554,501; 5,561,071; 5,571,639; 5,593,839; 5,599,695; 5,624,711; 5,658,734; and 5,700,637.

[0044] Using three independent data sets of patients and controls, the validity of whole blood-based gene expression profiling for the detection of NSCLC patients among smokers was investigated. It is shown that RNA-stabilized blood samples allow for the identification of NSCLC patients among hospital based controls as well as healthy individuals.

[0045] Using RNA-stabilized whole blood from smokers in three independent sets of NSCLC patients and controls, the inventors present a gene expression based classifier that can be used as a biomarker to discriminate between NSCLC cases and controls. The optimal parameters of this classifier were first determined by applying a classical 10-fold cross-validation approach to a training set consisting of NSCLC patients (stage I-IV) and hospital based controls (TS). Subsequently this optimized classifier was successfully applied to two independent validation sets, namely VS1 comprising NSCLC patients of stage I-IV and hospital based controls (VS1) and VS2 containing patients with stage I NSCLC and healthy blood donors. This successful application of the classifier in both validation sets underlines the validity and robustness of the classifier. Extensive permutation analysis using random feature lists and the possibility of building specific classifiers independently of the composition of the initial training set further support the specificity of the classifier. The inventors found no associations between stage of disease and the probability score assigned to each sample. In addition, the inventors observed no association between other cancers and the probability score of the controls (data not shown). But controls without documented morbidity (controls in VS2) tend to have lower probability scores to be a case as compared to controls with documented morbidity, although this was not statistically significant.

[0046] The gene set used to build the classifier was enriched in genes related to immune functions. The inventors therefore postulate, without wanting to be bound by theory, that the classifier is based on the transcriptome of blood-based immune effector cells rather than influenced by the occurrence of rare tumor cells occasionally detected in blood of cancer patients although this possibility cannot be ruled out (Nagrath, S. et al., Nature, 450: 1235-9 (2007)). Moreover, the lack of NSCLC tumor cell specific transcripts e.g. TTF1, cytokeratins or hTERT in the inventors' classifier points into the same direction. Gene set enrichment analysis (Osman, I. et al., Clin. Cancer Res., 12:3374-80 (2006)) of the gene set used in the inventors' diagnostic approach in comparison with published expression datasets from a variety of cancer entities (Segal, E. et al., Nat. Genet., 36: 1090-8 (2004)) revealed an significant overlap with 26% of the lung cancer tissue specific gene expression profiles. Since NSCLC tissue consists of tumor cells, immune and stromal cells (Critchley-Thorne, R. J. et al., PLoS Med., 4: e176 (2007)) the inventors presume that the similarities of both gene sets is due to a similar regulation of genes present in immune cells in NSCLC tissue and peripheral blood of NSCLC patients. These findings are in line with data demonstrating tumor-induced alteration of the immune system in mice (Burczynski, M. E. et al., Clin. Cancer Res., 11: 1181-9 (2005); Twine, N. C. et al., Cancer Res., 63: 6069-75 (2003)) and in men (Showe, M. K. et al., Cancer Res., 69: 9202-10 (2009); Keller, A. et al., BMC Cancer, 9: 353 (2009)).

[0047] Recently, Showe, M. K. et al., Cancer Res., 69: 9202-10 (2009) reported a NSCLC associated gene expression signature derived from PBMC of predominantly early stage NSCLC patients. Also in this study an enrichment of immune-associated pathways in the signature was observed further indicating that the alteration of the immune system might be a common feature already during the initial phase of NSCLC development. Since the inventors used RNA-stabilized whole blood and not PBMC for analysis, the signature identified by Showe et al. could not be used in the inventors' dataset to distinguish between cases and controls. The same holds true when applying the inventors' classifier to the published data set. Findings derived from several of the inventors' own studies further underline that signatures derived from PBMC and RNA-stabilized whole blood samples cannot be directly compared (Debey, S. et al., Pharmacogenomics J., 4: 193-207 (2004); Debey, S. et al., Genomics, 87: 653-64 (2006)). However, for clinical applicability and robustness, RNA-stabilized approaches reveal more reliable results in a multi-center setting (Debey, S. et al., Genomics, 87: 653-64 (2006)).

### DESCRIPTION OF THE FIGURES

[0048] FIG. 1: Experimental design. In the training data set (TS) the optimal classifier was established, and then applied to two validation data sets (VS1 and VS2). To test the specificity of this optimized classifier additional 1000 classifiers using random feature lists of equal size were permuted and applied to validation set 1 and 2. SVM=support vector machine, LDA=linear discrimination analysis, PAM=prediction analysis of microarrays, NSCLC=non-small cell lung cancer.

[0049] FIG. 2: (A) Identification of the optimal algorithm for a classification based on the training set. The mean area under the receiver operator curve (AUC) is plotted against the cut-off p value of the T-statistics for feature selection for all three algorithms (SVM, LDA, PAM) in the 10-fold cross-validation of the training set. SVM leads to the highest mean AUC (mean AUC=0.754) at a cut-off p-value of 0.003 which is highlighted by a dotted line. (B) The fold change of the genes with the most significant changes (p<0.003, fold change >1.3 or <0.7, absolute difference >80) are shown. All transcripts used in the optimized classifier are given in Table 2.

[0050] FIG. 3: Performance of optimized classifier in validation set 1 and 2, respectively. The classifier established in the training set was applied to validation data set 1 and 2 respectively using SVM. (A) Receiver operating characteristic (ROC) curve for the optimized classifier applied to validation set 1 (VS1: all stage NSCLC patients and hospital based controls) AUC=0.824, p<0.001. (B) The box plot comprises 1000 AUCs obtained by using 1000 random list of 484 features to build the classifier in TS and then apply it to VS1. The real AUC using the specific classifier (see FIG. 3A) is depicted. (C) ROC curve for the optimized classifier applied to validation set 2 (VS2: stage I NSCLC patients, healthy controls) AUC=0.977 (p<0.001). (D) The box plot comprises AUCs obtained by applying 1000 randomly permutated classifiers of same feature size to validation set 2. The real AUC using the specific classifier (see FIG. 3C) is depicted. (E) Test scores to be a case of all samples from VS1 and VS2 were ranked. NSCLC cases are marked in grey and controls in black. Cases with stage I NSCLC are indicated by ▴. Membership in a specific cohort is indicated by a vertical line underneath the graph (VS1 upper row, VS2 lower row). A horizontal line is drawn at the threshold defined in TS.

### DESCRIPTION OF THE LISTS

[0051] Lists 1 to 51 show exemplary sets of RNAs whose abundance in a blood sample from a human individual can be determined according to the invention to detect NSCLC in the individual. Each list shows a set of RNAs (defined by accession number and probe ID) with an area under the curve (AUC) of at least 0.8. The AUC is a quantitative parameter for the clinical utility (specificity and sensitivity) of the detection method described herein. An AUC of 1.0 refers to a sensitivity and specificity of 100%.

### EXAMPLES

[0052] The invention is further described in the following non-limiting examples.

### Material and Methods

### Cases and Controls:

[0053] NSCLC cases and hospital based controls were recruited at the University Hospital Cologne and the Lung Clinic Merheim, Cologne, Germany. Healthy blood donors were recruited at the Institute for Transfusion Medicine, University of Cologne. From all individuals, PAXgene stabilized blood samples were taken for blood-based gene expression profiling. For all NSCLC cases, blood was taken prior to chemotherapy. To establish and validate a NSCLC specific classifier, 3 independent sets of cases and controls were assembled. The training set (TS) comprised 77 individuals. 35 of those represent NSCLC cases of stage I-IV admitted to the hospital with symptoms of non-small cell lung cancer (coughing, dyspnea, weight loss or reduction in general health state) and 42 were hospital based controls with a comparable comorbidity but no prior history of lung cancer. The validation set 1 (VS1, n=54) likewise contained 28 NSCLC cases of stage I-IV and 26 hospital based controls. Overall, the hospital based controls in TS and VS1 enclosed individuals suffering from advanced chronic obstructive pulmonary disease (COPD) as typically seen in a population of heavily smoking adults (TS: n=7 VS1: n=5). Other diseases such as hypertension (TS: n=17, VS: n=11) or other malignancies (TS: n=10; VS1: n=6) were also observed in the group of hospital based controls. The validation set 2 (VS2, n=102) contained 32 NSCLC cases that had documented stage I NSCLC and were diagnosed mostly during routine chest-rays or due to clinical workup of unspecific symptoms such as reduced general health status. All individuals had an ECOG performance status of 0. In addition VS2 contains 70 healthy blood donors without prior history of lung cancer. Detailed information on cases and controls are summarized in Table 1. The analyses were approved by the local ethics committee and all probands gave informed consent.

Blood Collection, cRNA Synthesis and Array Hybridization:

[0054] Blood (2.5 ml) was drawn into PAXgene vials. After RNA isolation biotin labeled cRNA preparation was performed using the Ambion® Illumina RNA amplification kit (Ambion, UK) or Epicentre TargetAmp™ Kit (Epicentre Biotechnologies, USA) and Biotin-16-UTP (10 mM; Roche Molecular Biochemicals) or Illumina® TotalPrep RNA Amplification Kit (Ambion, UK). Biotin labeled cRNA (1.5 μg) was hybridized to Sentrix® whole genome bead chips WG6 version 2, (Illumina, USA) and scanned on the Illumina® BeadStation 500×. For data collection, the inventors used Illumina® BeadStudio 3.1.1.0 software.

### Quality Control:

[0055] For RNA quality control the ratio of the OD at wavelengths of 260 nm and 280 nm was calculated for all samples and was between 1.85 and 2.1. To determine the quality of cRNA, a semi-quantitative RT-PCR amplifying a 5′ prime and a 3′ prime product of the β-actin gene was used as previously described (Zander T. et al., J. Med. Biol. Res., 39: 589-93 (2006)) and demonstrated no sign of degradation with the 5′ prime and a 3′ prime product being present. All expression data presented in this manuscript were of high quality. Quality of RNA expression data was controlled by different separate tools. First, the inventors performed quality control by visual inspection of the distribution of raw expression values. Therefore, the inventors constructed pairwise scatterplots of expression values from all arrays (R-project Vs 2.8.0) (Team RDC. R: A language and environment for statistical computing. R Foundation for Statistical Computing (2006)). For data derived from an array of good quality a high correlation of expression values is expected to lead to a cloud of dots along the diagonal. In all comparisons the r² was above 0.95. Second the present call rate was high in all samples. Finally, the inventors performed quantitative quality control. Here, the absolute deviation of the mean expression values of each array from the overall mean was determined (R-project Vs 2.8.0) (Team RDC. R: A language and environment for statistical computing. R Foundation for Statistical Computing (2006)). In short, the mean expression value for each array was calculated. Next the mean of these mean expression values (overall mean) was taken and the deviation of each array mean from the overall mean was determined (analogous to probe outlier detection used by Affymetrix before expression value calculation) (Affymetrix. Statistical algorithms description document; http://www.affymetrix.com/support/technical/whitepapers/sadd_whitepaper.pdf (2002)). The deviation was below 28 for all samples.

### Classification Algorithm:

[0056] An overview of the experimental design is depicted in FIG. 1. Expression values were independently quantile normalized. The classifier for NSCLC was built and optimized based on the training set (TS, n=77; 35 NSCLC cases stage I-IV and 42 hospital based controls) using a 10 fold cross-validation design. Briefly TS was divided 10 times into an internal training and an internal validation set in a ratio 9:1 (distribution to internal validation group see Supplementary Table 1). In the internal training set the differentially expressed genes between NSCLC cases and controls were calculated using a T-test. Next, 36 different feature lists were extracted from this list of differential expressed genes by 36 times sequentially increasing the cut-off of the p-value (p=0.00001, p=0.00002, p=0.00003 . . . - . . . p=0.08, p=0.09, p=0.1). Subsequently, for each of the resulting 36 feature lists 3 different learning algorithms (support vector machine (SVM), linear discrimination analysis (LDA), and prediction analysis for microarrays (PAM)) were trained on the internal training set and used to calculate the probability score for each case of the respective internal validation set. This approach was repeated 10 times according to the 10 dataset splittings of this 10-fold cross-validation. For each of the 10 cross-validation steps the area under the receiver operator curve (AUC) was calculated for the internal validation set. For each of the 36 cut-offs the mean of the 10 AUCs was calculated. Each of the 10 split data sets was used once as internal validation set. The optimal cut-off p value of the T-statistics and the optimal classification algorithm were selected according to the maximum mean AUC ever reached in all of the three algorithms (FIG. 2). The inventors subsequently built a classifier using the respective cut-off p-value of the T-statistics and the selected algorithm in the TS. To further control for overfitting (Lee, S., Stat. Methods Med. Res., 17: 635-42 (2008)), the classifier was validated in 2 independent validation sets (VS1, comprising 28 NSCLC cases (stage I-IV) and 26 hospital based controls; VS2 comprising 32 NSCLC cases (stage I) and 70 healthy controls). The AUC was used to measure the quality of the classifier. In addition, the inventors determined a threshold of the test score in the training set to evaluate sensitivity and specificity in the validation sets. In order not to miss a potential case with NSCLC the inventors maximized the sensitivity to detect NSCLC requiring a minimum specificity (Akobeng, A., Acta Paediatr, 96: 644-7 (2007)). This specificity was defined to be at least 0.5 in its 95% confidence interval. Of note, the threshold fulfilling these criteria was determined in TS. Subsequently, all individuals in VS1 and VS2 reaching an equal or higher test score than the TS based threshold score were diagnosed as NSCLC cases and all others were diagnosed as controls. The sensitivity and specificity of this diagnostic test and its 95% confidence interval was estimated for VS1 and VS2 (Newcombe, R. G., Stat. Med., 17: 857-72 (1998)) In addition, the inventors compared the probability scores to be a NSCLC case for each case and control using T statistics. To test the specificity of the classifier the whole analysis was repeated thousand times using random feature sets of equal size. For visualisation of the test score obtained by the SVM algorithm, the inventors used the following transformation algorithm (log 2(score+1)+0.1.

### Datamining:

[0057] To investigate gene ontology of transcripts used for the classifier GeneTrail analysis for over- and under-expressed genes (Backes, C. et al., Nucleic Acids Res., 35: W186-92 (2007)) was performed. To this end, the inventors analyzed the enrichment in genes in the classifier compared to all genes present on the whole array. The inventors analyzed under-respectively over-expressed genes using the hypergeometric test with a minimum of 2 genes per category.

[0058] In addition, the inventors performed datamining by Gene Set Enrichment Analysis (GSEA) (Subramanian, A. et al., Proc. Natl. Acad. Sci. USA, 102: 15545-50 (2005)). As indicated, the inventors compared the respective list of genes obtained in the inventors' expression profiling experiment with datasets deposited in the Molecular Signatures Database (MSigDB). The power of the gene set analysis is derived from its focus on groups of genes that share common biological functions. In GSEA an overlap between predefined lists of genes and the newly identified genes can be identified using a running sum statistics that leads to attribution of a score. The significance of this score is tested using a permutation design which is adapted for multiple testing (Subramanian, A. et al., Proc. Natl. Acad. Sci. USA, 102: 15545-50 (2005)). Groups of genes, called gene sets were deposited in the MSigDB database and ordered in different biological dimensions such as cancer modules, canonical pathways, miRNA targets, GO-terms etc. (http://www.broadinstitute.org/gsea/-msigdb/index.jsp). In the analysis, the inventors focused on cancer modules. The cancer modules integrated into the MSigDB are derived from a compendium of 1975 different published microarrays spanning several different tumor entities (Segal, E. et al., Nat. Genet., 36: 1090-8 (2004)).

### Experimental Design:

[0059] Expression profiles were generated from PAXgene stabilized blood samples from 3 independent groups consisting of NSCLC cases and controls (n=77, 54, 102) using the Illumina WG6-VS2 system.

### Results:

[0060] Several genes are consistently differentially expressed in whole blood of NSCLC patients and controls. These expression profiles were used to build a diagnostic classifier for NSCLC which was validated in an independent validation set of NSCLC patients (stage I-IV) and hospital based controls. The area under the receiver operator curve (AUC) was calculated to be 0.824 (p<0.001). In a further independent dataset of stage I NSCLC patients and healthy controls the AUC was 0.977 (p<0.001). Specificity of the classifier was validated by permutation analysis in both validation cohorts. Genes within the classifier are enriched in immune associated genes and demonstrate specificity for non-small cell lung cancer.

### Conclusions:

[0061] The inventors' results show that gene expression profiles of whole blood allow for detection of manifest NSCLC. These results prompted further development of gene expression based biomarker tests in peripheral blood for the diagnosis and early detection i.e. stage I lung cancer of NSCLC.

### Establishment of a Gene Expression Profiling-Based Classifier for Blood-Based Diagnosis of NSCLC:

[0062] The classifier was build based on an initial training set (TS) containing 35 NSCLC cases of different stages (stage I: n=5, stage II: n=5, stage III: n=17, stage IV: n=8) and 42 hospital based controls suffering in part from severe comorbidities such as COPD, hypertension, cardiac diseases as well as malignancies other than lung cancer. The inventors first evaluated three different approaches, namely support vector machine (SVM), linear discrimination analysis (LDA) and prediction analysis of microarrays (PAM) to identify the best algorithm to build a classifier for the diagnosis of NSCLC in a 10 fold cross-validation design. To this end, the inventors used 36 different feature lists extracted from the list of differentially expressed genes according to 36 different cut-off p-values of the T-statistics. In this setting the SVM algorithm performed best by reaching the highest AUC (mean AUC=0.754) at a cut-off p-value of the T-statistics of 0.003 (FIG. 2A). Thus for subsequent classification, the inventors applied SVM by using the 484 feature list obtained at a cut-off p-value of the T-statistics of p<0.003 for differential expressed genes between cases and controls based on the entire training set. Fold-changes of genes with most significant p-values are shown in FIG. 2B and all transcripts used in the classifier are summarized in Table 2. The inventors next maximized the sensitivity of the classifier requiring the 95% confidence interval of the specificity to still comprise 0.5. Using these criteria the threshold of the test score was determined to be 0.082. At this threshold of the test score sensitivity was determined to be 0.91 (0.75-0.97) and the specificity 0.38 (0.23-0.54), i.e. the 95° A) confidence interval comprising 0.5.

### Use of the Diagnostic NSCLC Classifier to Detect NSCLC Cases in an Independent Validation Set of NSCLC Cases and Hospital Based Controls:

[0063] First it was validated whether the classifier can be used to discriminate NSCLC cases of early and advanced stages among hospital based controls. Therefore, in the first independent validation set cases and controls were chosen in a similar setting as in the training set, i.e. patients with NSCLC stage I-IV and clinical symptoms associated with lung cancer and hospital based controls with relevant comorbidities (n=26). The AUC for the diagnostic test of NSCLC in this first validation set was calculated to be 0.824 (p<0.001) (FIG. 3A). In addition, the inventors observed a significant difference between the SVM based probability scores to be a NSCLC case for actual NSCLC cases and controls in VS1 (p<0.001, T-test). Using the threshold determined in TS, the inventors observed a sensitivity of 0.61 (range 0.41-0.78) and a specificity of 0.85 (range 0.64-0.95) in VS1. Regarding only patients with stage III/IV non-small cell lung cancer (n=20) in VS1 the sensitivity was 0.70 (range 0.46-0.87) and the specificity 0.85 (range 0.64-0.95; data not shown). The inventors observed that three out of three stage I NSCLC cases had a low score in this cohort of patients with a high degree of comorbidity (FIG. 3E). Patients with NSCLC of advanced stages in VS1 were identified among hospital based controls using the threshold determined in the training set.

### The Diagnostic NSCLC Classifier Identifies Stage 1 NSCLC Patients in an Independent Second Validation Set Comprising Stage I NSCLC Cases and Healthy Blood Donors:

[0064] After demonstrating that the classifier can be used to detect NSCLC cases among individuals with comorbidities it was also investigated whether this test can be used to distinguish NSCLC cases presenting at stage I with no or only minor symptoms from healthy individuals. Therefore, the inventors recruited a second independent validation set consisting of 32 NSCLC cases at stage 1 and 70 healthy blood donors (VS2). By applying the identical classifier to VS2 the AUC was determined to be 0.977 (p<0.001) (FIG. 3C). Again the classifier was used as a diagnostic test thereby applying the TS-based threshold of the test score. At this threshold the sensitivity was 0.97 (0.82-0.99) and the specificity 0.89 (0.78-0.95). The inventors also observed a highly significant difference in the probability values to be a NSCLC patient for cases in contrast to controls (p<0.001, T-test). Healthy controls without significant comorbidity (VS2) tend to have lower probability scores compared to hospital based controls (VS1 and TS) although this finding was not statistically significant (FIG. 3E). Of note, the difference in the probability score between healthy controls and patients with stage I lung cancer is more pronounced compared to the difference of probability scores between patients with NSCLC stage III/IV and patients with a similar high load of comorbidity.

### Permutation Test to Analyse the Specificity of the Classifier:

[0065] To further underline the specificity of this classifier, the inventors used 1000 random feature lists each comprising 484 features to likewise build a SVM-based classifier in the training set (TS) which then were applied to validation set 1 (VS1) and validation set 2 (VS2), respectively. For VS1 the mean AUC obtained by using these random feature lists was 0.49 (range 0.1346-0.8633) with only 2 AUCs being 0.824, the AUC obtained using the NSCLC specific classifier (FIG. 3B). This corresponds to a p-value of less than 0.002 for the permutation test further confirming the specificity of the NSCLC classifier. Similarly, by applying the permuted classifiers to VS2, only 1.8% of random feature lists lead to an AUC of 0.977, the AUC obtained using the NSCLC-specific classifier (FIG. 3D). Furthermore, by merging TS and VS1 and randomly generating new dataset splitting in TS′ and VS1′ it could be demonstrated that highly specific classifiers can be built independently of the initial composition of the training set (data not shown). In conclusion, a NSCLC-specific blood-based classifier was build that was successfully used to identify NSCLC cases among hospital based controls as well as NSCLC cases of early stage among healthy individuals.

### Mining of Expression Profiles:

[0066] To analyze the biological significance of the extracted 484 features derived as classifier by the SVM approach different strategies were used. First, the inventors used GeneTrail (Backes, C. et al., Nucleic Acids Res., 35: W186-92 (2007)) to analyze an enrichment in GO-terms of the genes associated with NSCLC in the inventors' study. The inventors observed 112 GO categories demonstrating a significant (p-value FDR corrected <0.05) enrichment of genes in the inventors' extracted gene list of which 25 were associated with the immune system (Table 3). These data indicate an impact of immune cells to the genes involved in the classifier.

[0067] Next, the inventors performed a gene set enrichment analysis ((Subramanian, A. et al., Proc. Natl. Acad. Sci. USA, 102: 15545-50 (2005); Segal, E. et al., Nat. Genet., 36: 1090-8 (2004)), thereby focusing on cancer modules which comprise groups of genes participating in biological processes related to cancer. Initially, the power of such modules has been demonstrated exemplarily for single genes such as cyclin D1 or PGC-1alpha (Lamb, J. et al., Cell, 114: 323-34 (2003); Mootha, V. K. et al., Nat. Genet., 34: 267-73 (2003)) and a more comprehensive view on such modules has been introduced recently (Segal, E. et al., Nat. Genet., 36: 1090-8 (2004)). This comprehensive collection of modules allows the identification of similarities across different tumor entities, such as the common ability of a tumor to metastasize to the bone e.g. in subsets of breast, lung and prostate cancer (Segal, E. et al., Nat. Genet., 36: 1090-8 (2004)). Overall, 456 such modules are described in the database spanning several biological processes such as metabolism, transcription, cell cycle and others.

[0068] When analysing the identified 484 NSCLC specific features, 199 cancer modules including 26% of all NSCLC associated modules where identified to show a significant enrichment. This indicates that genes used to build a classifier for NSCLC cases in the inventors' study represent in part a subset of biologically cooperating genes that are also differentially expressed in primary lung cancer.

[0069] To further investigate the specificity of the extracted list of 484 features obtained from the analysis for the classification of NSCLC, the inventors also calculated the overlap between this extracted gene set and a set of genes differentially expressed in the blood of patients with renal cell cancer (Twine, N. C. et al., Cancer Res., 63: 6069-75 (2003); Sharma, P. et al., Breast Cancer Res., 7: R634-44 (2005)). No significant overlap was observed for both gene sets. Similarly, no overlap was observed between the inventors' NSCLC specific gene set and gene sets obtained from blood-based expression profiles specific for melanoma (Critchley-Thorne, R. J. et al., PLoS Med., 4: e176 (2007)), breast (Sharma, P. et al., Breast Cancer Res., 7: R634-44 (2005)) and bladder (Osman, I. et al., Clin. Cancer Res., 12:3374-80 (2006)), respectively. In summary, these data point to a NSCLC specific gene set present in the inventors' classifier.

TABLE 1
Clinical and epidemiological characteristics of cases with NSCLC and
respective controls. TS = training set, VS1 = validation set 1,
VS2 = validation set 2, NSCLC = non-small lung cancer cases,
T = Total number of cases resp. controls per data set, F = Females,
M = Males, mA = median age, S = Stage, NA = not
applicable, All = all cases, SCC = squamous cell cancer,
AC = adenocarcinoma, LCC = large cell carcinoma

| | | TS1 | | VS1 | | VS2 | |
|---|---|---|---|---|---|---|---|
| | | NSCLC | controls | NSCLC | controls | NSCLC | controls |
| T | | 35 | 42 | 28 | 26 | 32 | 70 |
| F | | 10 | 14 | 9 | 10 | 16 | 35 |
| M | | 25 | 28 | 19 | 16 | 16 | 35 |
| mA | | 61 | 61 | 62 | 65 | 67 | 44 |
| S1 | All | 5 | NA | 6 | NA | 32 | NA |
| | SCC | 2 | | 2 | | 4 | |
| | AC | 3 | | 4 | | 23 | |
| | LCC | 0 | | 0 | | 5 | |
| S2 | All | 5 | NA | 2 | NA | 0 | NA |
| | SCC | 1 | | 1 | | 0 | |
| | AC | 4 | | 1 | | 0 | |
| | LCC | 0 | | 0 | | 0 | |
| S3 | All | 17 | NA | 12 | NA | 0 | NA |
| | SCC | 4 | | 7 | | 0 | |
| | AC | 12 | | 5 | | 0 | |
| | LCC | 1 | | 0 | | 0 | |
| S4 | All | 8 | NA | 8 | | 0 | NA |
| | SCC | 3 | | 0 | | 0 | |
| | AC | 5 | | 7 | | 0 | |
| | LCC | 0 | | 1 | | 0 | |

TABLE 2
RNAs whose abundance may be measured in the invention

| RNA NO/ | | | | | | | |
|---|---|---|---|---|---|---|---|
| SEQ ID NO | ProbeId | Gid | Accession | Symbol | Diff | Quot | Ttest_p_value |
| 1 | 6290561 | 88998614 | XM_936120.1 | HLA-DQA1 | 315.8964785 | 1.64433008 | 0.000329596 |
| 2 | 2900463 | 7108345 | NM_012483.1 | GNLY | 926.3133937 | 1.612886994 | 0.002862239 |
| 3 | 3990639 | 36748 | X00437 | | 771.7174513 | 1.555765766 | 4.83E−05 |
| 4 | 670041 | 50477326 | CR596519 | | 548.9905075 | 1.522206107 | 3.32E−05 |
| 5 | 4850192 | 51036597 | NM_006725.2 | CD6 | 216.5093624 | 1.520125461 | 0.000132444 |
| 6 | 6480500 | 24797073 | NM_033554.2 | HLA-DPA1 | 588.5023681 | 1.477667953 | 0.00013302 |
| 7 | 460754 | 47078254 | NM_212530.1 | CDC25B | 218.4805426 | 1.466578356 | 0.000195968 |
| 8 | 5960035 | 24850108 | NM_170699.1 | GPBAR1 | 100.9412072 | 1.463343623 | 0.00015651 |
| 9 | 3420630 | 45331203 | NM_007181.3 | MAP4K1 | 141.7841323 | 1.45743426 | 0.000621345 |
| 10 | 1110215 | 14149679 | NM_015292.1 | FAM62A | 222.9573258 | 1.428150347 | 3.25E−05 |
| 11 | 1110575 | 51173716 | NM_006720.3 | ABLIM1 | 178.3940667 | 1.414951976 | 0.000520001 |
| 12 | 2760092 | 34147517 | NM_005449.3 | FAIM3 | 201.7565646 | 1.409529365 | 0.000634628 |
| 13 | 1170307 | 23238195 | NM_000878.2 | IL2RB | 146.6316959 | 1.40578311 | 0.000500983 |
| 14 | 6960746 | 55774984 | NM_018384.3 | GIMAP5 | 223.2919717 | 1.382086438 | 4.02E−05 |
| 15 | 2680370 | 52426773 | NM_019111.3 | HLA-DRA | 817.1291554 | 1.377401879 | 0.000326414 |
| 16 | 1820598 | 12545398 | NM_000873.2 | ICAM2 | 182.5185371 | 1.351682752 | 3.89E−05 |
| 17 | 4010053 | 18641371 | NM_022555.3 | HLA-DRB3 | 131.0547184 | 1.349610681 | 0.001995927 |
| 18 | 6760487 | 47778936 | NM_014164.4 | FXYD5 | 393.3630931 | 1.33904597 | 0.001262983 |
| 19 | 5560280 | 29029549 | NM_017424.2 | CECR1 | 301.0469939 | 1.32885363 | 0.002167663 |
| 20 | 4900053 | 17978510 | NM_014281.3 | SIAHBP1 | 189.9410753 | 1.323848811 | 2.21E−05 |
| 21 | 4760543 | 34335248 | NM_153719.2 | NUP62 | 118.4147225 | 1.307105002 | 1.39E−05 |
| 22 | 4590082 | 17999536 | NM_006445.2 | PRPF8 | 125.5348006 | 1.304518217 | 0.000927196 |
| 23 | 2690609 | 62526019 | NM_001014433.2 | CUTA | 223.2296564 | 1.301630178 | 0.000120692 |
| 24 | 650164 | 4503240 | NM_000896.1 | CYP4F3 | −315.5464725 | 0.699584557 | 3.55E−05 |
| 25 | 6220450 | 40548399 | NM_005771.3 | DHRS9 | −181.3140503 | 0.694871194 | 0.001532317 |
| 26 | 3460674 | 47419935 | NM_003137.3 | SRPK1 | −139.764433 | 0.694069927 | 3.60E−05 |
| 27 | 3990296 | 9951925 | NM_000717.2 | CA4 | −213.0886356 | 0.693534636 | 0.001400277 |
| 28 | 160132 | 59938769 | NM_182898.2 | CREB5 | −262.1114924 | 0.69200725 | 0.00019583 |
| 29 | 6110088 | 21536375 | NM_005502.2 | ABCA1 | −111.4628782 | 0.659789914 | 0.002134427 |
| 30 | 6350364 | 41872408 | NM_002704.2 | PPBP | −761.2674927 | 0.651771499 | 0.000630226 |
| 31 | 2640609 | 45827727 | NM_005980.2 | S100P | −390.18098 | 0.625545099 | 0.000253144 |
| 32 | 1430762 | 6005791 | NM_007199.1 | IRAK3 | −155.6188523 | 0.616800598 | 0.000474504 |
| 33 | 5130475 | 27477087 | NM_003853.2 | IL18RAP | −632.4410294 | 0.583984119 | 0.000851483 |
| 34 | 1500328 | 27477086 | NM_003855.2 | IL18R1 | −122.3006055 | 0.528089291 | 0.001627845 |
| 35 | 2370524 | 26051242 | NM_007115.2 | TNFAIP6 | −189.5036814 | 0.489548363 | 1.09E−06 |
| 36 | 7550537 | 4502098 | NM_001152.1 | SLC25A5 | 326.6719362 | 1.197818187 | 1.44E−05 |
| 37 | 4280332 | 14251213 | NM_020414.3 | DDX24 | 75.4163163 | 1.309570343 | 3.02E−05 |
| 38 | 3360364 | 7662339 | NM_014941.1 | MORC2 | 54.87417822 | 1.317774309 | 4.03E−05 |
| 39 | 1780348 | 70908369 | NM_018285.2 | IMP3 | 148.6064801 | 1.240632612 | 5.80E−05 |
| 40 | 450037 | 55925577 | NM_002348.2 | LY9 | 64.18668944 | 1.337080038 | 7.31E−05 |
| 41 | 6980070 | 13929470 | NM_004776.2 | B4GALT5 | −121.2712825 | 0.720729919 | 9.61E−05 |
| 42 | 7000133 | 12597634 | NM_022898.1 | BCL11B | 87.76854653 | 1.366299623 | 0.000470008 |
| 43 | 1400270 | 20336247 | NM_004716.2 | PCSK7 | 94.29387128 | 1.302793128 | 0.000716583 |
| 44 | 150632 | 48762708 | NM_022136.3 | SAMSN1 | −80.93158519 | 0.591012921 | 0.000781956 |
| 45 | 6420541 | 34535726 | AK128384 | | 87.13245532 | 1.405980431 | 0.001078556 |
| 46 | 7650025 | 40806176 | NM_004949.2 | DSC2 | −93.38175241 | 0.642737193 | 0.001292334 |
| 47 | 5960128 | 21327699 | NM_003487.2 | TAF15 | 87.80187716 | 1.346679516 | 0.001679561 |
| 48 | 6420079 | 89027874 | XM_291277.4 | DKFZp761P0423 | 80.22901015 | 1.337704578 | 0.001921658 |
| 49 | 4590646 | 67089144 | NM_001024667.1 | FCRL3 | 94.2507356 | 1.380488839 | 0.002010981 |
| 50 | 510450 | 29789089 | NM_018715.1 | RCC2 | 88.67276932 | 1.267465318 | 1.24E−05 |
| 51 | 7380288 | 34147585 | NM_016237.3 | ANAPC5 | 91.54539975 | 1.176438251 | 8.97E−05 |
| 52 | 5900156 | 57013275 | NM_006082.2 | K-ALPHA-1 | 543.1415197 | 1.219305455 | 0.000108016 |
| 53 | 7100136 | 41352720 | NM_078483.2 | SLC36A1 | −133.4968039 | 0.700431238 | 0.000133553 |
| 54 | 2630451 | 22027639 | NM_003528.2 | HIST2H2BE | −106.9694117 | 0.715024497 | 0.000134858 |
| 55 | 6280754 | 18426908 | NM_080816.1 | SIRPB2 | 30.07920138 | 1.308367153 | 0.000139409 |
| 56 | 4210647 | 13375800 | NM_024600.1 | C16orf30 | 31.66193318 | 1.346066522 | 0.000170914 |
| 57 | 5700403 | 31982913 | NM_032118.2 | WDR54 | 67.77289263 | 1.331399486 | 0.000188678 |
| 58 | 6270021 | 14141153 | NM_031203.1 | HNRPM | 175.5084406 | 1.233305528 | 0.00023295 |
| 59 | 1710286 | 21536460 | NM_002405.2 | MFNG | 186.80371 | 1.213068636 | 0.000240549 |
| 60 | 2630154 | 56676368 | NM_031412.2 | GABARAPL1 | −174.3602129 | 0.768240176 | 0.000244873 |
| 61 | 4060131 | 4758669 | NM_004811.1 | LPXN | 169.3070648 | 1.22742049 | 0.000265747 |
| 62 | 610563 | 14141173 | NM_002129.2 | HMGB2 | −47.59152899 | 0.643902556 | 0.000271029 |
| 63 | 6290431 | 49472821 | NM_003755.2 | EIF3S4 | 289.038097 | 1.265068842 | 0.000284449 |
| 64 | 7150017 | 58331183 | NM_006429.2 | CCT7 | 38.59039574 | 1.316676229 | 0.000311432 |
| 65 | 3170092 | 52851435 | NM_015710.3 | GLTSCR2 | 951.7801905 | 1.265887651 | 0.000319621 |
| 66 | 6940242 | 13128859 | NM_004964.2 | HDAC1 | 149.0464951 | 1.226649864 | 0.000355245 |
| 67 | 5130082 | 20149593 | NM_007355.2 | HSP90AB1 | 101.2393963 | 1.291963927 | 0.000372701 |
| 68 | 5310653 | 6912575 | NM_012387.1 | PADI4 | −903.4667472 | 0.718802076 | 0.000399258 |
| 69 | 380685 | 34147607 | NM_015953.3 | NOSIP | 201.9140045 | 1.2941855 | 0.00044799 |
| 70 | 3440431 | 29337284 | NM_012110.2 | CHIC2 | −117.5328049 | 0.822270062 | 0.000549514 |
| 71 | 4180142 | 51093838 | NM_016091.2 | EIF3S6IP | 296.2042703 | 1.221453733 | 0.000621455 |
| 72 | 1260228 | 10863876 | NM_021105.1 | PLSCR1 | −53.52413775 | 0.686231584 | 0.00064387 |
| 73 | 840730 | 40786401 | NM_199337.1 | LOC374395 | 170.1866859 | 1.178701902 | 0.000665379 |
| 74 | 3370605 | 45237199 | NM_020808.1 | SIPA1L2 | −58.97844017 | 0.687553371 | 0.000697156 |
| 75 | 5310136 | 75991708 | NM_001033667.1 | LY9 | 33.64428254 | 1.319047944 | 0.000716611 |
| 76 | 6380148 | 15431305 | NM_033301.1 | RPL8 | 855.395502 | 1.170817986 | 0.000768045 |
| 77 | 4050398 | 47132594 | NM_213611.1 | SLC25A3 | 190.2461506 | 1.160808106 | 0.000837252 |
| 78 | 6940246 | 292820 | M97723 | | 20.54719112 | 1.328176844 | 0.000841772 |
| 79 | 1690189 | 24234685 | NM_153201.1 | HSPA8 | 155.7459284 | 1.215840724 | 0.000855179 |
| 80 | 3890095 | 58696421 | NM_002304.1 | LFNG | 232.3486066 | 1.232868306 | 0.001042389 |
| 81 | 6770348 | 19920316 | NM_006825.2 | CKAP4 | −161.4085766 | 0.746907843 | 0.001086179 |
| 82 | 2000551 | 10092611 | NM_016326.2 | CKLF | −325.605478 | 0.801639824 | 0.001103698 |
| 83 | 6350360 | 50593531 | NM_005176.4 | ATP5G2 | 516.754743 | 1.243669891 | 0.00114794 |
| 84 | 160240 | 21040370 | NM_005804.2 | DDX39 | 101.9627944 | 1.230286148 | 0.001187406 |
| 85 | 360066 | 7019566 | NM_013378.1 | VPREB3 | 58.73278863 | 1.504196763 | 0.001230244 |
| 86 | 3800253 | 89035372 | XM_932678.1 | LOC387841 | 189.24229 | 1.278629303 | 0.001252967 |
| 87 | 3400328 | 47078294 | NM_000022.2 | ADA | 67.32199518 | 1.313091331 | 0.001361042 |
| 88 | 3800243 | 5031976 | NM_005746.1 | PBEF1 | −348.2606482 | 0.718301277 | 0.001419039 |
| 89 | 650541 | 45935370 | NM_002727.2 | PRG1 | −1496.501337 | 0.775793901 | 0.00150564 |
| 90 | 2100221 | 40353209 | NM_017758.2 | ALKBH5 | 161.2343238 | 1.161468316 | 0.001576054 |
| 91 | 6280576 | 21614543 | NM_002964.3 | S100A8 | −3148.764309 | 0.740939542 | 0.001592006 |
| 92 | 4780672 | 68216098 | NM_012413.3 | QPCT | −224.4635907 | 0.775514046 | 0.001600979 |
| 93 | 2510133 | 4506782 | NM_003864.1 | SAP30 | −78.20837572 | 0.607275759 | 0.001706434 |
| 94 | 770458 | 70995210 | NM_001398.2 | ECH1 | 140.6533489 | 1.216657159 | 0.001780796 |
| 95 | 2970768 | 4503528 | NM_001416.1 | EIF4A1 | 408.0155473 | 1.170835965 | 0.001793442 |
| 96 | 2320309 | 89037018 | XM_941325.1 | LOC652025 | 117.8979784 | 1.237697761 | 0.001829317 |
| 97 | 4220181 | 4505370 | NM_002496.1 | NDUFS8 | 171.4535635 | 1.260630153 | 0.001853457 |
| 98 | 7380170 | 28178815 | NM_174855.1 | IDH3B | 104.9723088 | 1.205100893 | 0.001927203 |
| 99 | 520647 | 20149601 | NM_012229.2 | NT5C2 | −220.1185076 | 0.806670139 | 0.001970138 |
| 100 | 2710711 | 23200005 | NM_149379.1 | NSUN5C | 34.34062961 | 1.320832601 | 0.002020028 |
| 101 | 2680682 | 47157327 | NM_213636.1 | PDLIM7 | −106.9173695 | 0.774721384 | 0.002138706 |
| 102 | 3610634 | 41327713 | NM_020531.2 | C20orf3 | −169.2466369 | 0.762496036 | 0.002151473 |
| 103 | 5860075 | 27436923 | NM_003517.2 | HIST2H2AC | −148.5459367 | 0.787951043 | 0.002154776 |
| 104 | 1030039 | 21328454 | NM_003516.2 | HIST2H2AA | −122.2515261 | 0.785390725 | 0.002180554 |
| 105 | 5900021 | 11072092 | NM_018031.2 | WDR6 | 110.7543183 | 1.289322955 | 0.002181731 |
| 106 | 2650390 | 33598947 | NM_002660.2 | PLCG1 | 65.59369512 | 1.328004119 | 0.002261605 |
| 107 | 20154 | 33624782 | NM_145799.2 | | 74.78050355 | 1.302850102 | 0.002265789 |
| 108 | 830400 | 9845520 | NM_002965.2 | S100A9 | −1676.927338 | 0.75302877 | 0.002267466 |
| 109 | 3990328 | 37577120 | NM_080387.4 | CLEC4D | −47.99765081 | 0.635020703 | 0.002285359 |
| 110 | 2970537 | 15431299 | NM_000980.2 | RPL18A | 1096.761159 | 1.208535779 | 0.002326571 |
| 111 | 5420538 | 6552334 | NM_000852.2 | GSTP1 | 265.0758172 | 1.212234469 | 0.002377771 |
| 112 | 240608 | 6042201 | NM_007288.1 | MME | −221.958069 | 0.761262136 | 0.002402057 |
| 113 | 10025 | 40788009 | NM_000574.2 | CD55 | −178.8297083 | 0.72532828 | 0.002428894 |
| 114 | 290452 | 47519615 | NM_213674.1 | TPM2 | 30.21632141 | 1.308702924 | 0.002451226 |
| 115 | 7400121 | 13435358 | NM_001923.2 | DDB1 | 229.4803921 | 1.262296307 | 0.002565468 |
| 116 | 3130300 | 50345983 | NM_001001937.1 | ATP5A1 | 225.076896 | 1.147238723 | 0.002626228 |
| 117 | 6660709 | 6006013 | NM_000632.2 | ITGAM | −167.4535448 | 0.769754788 | 0.002684536 |
| 118 | 2900482 | 4503518 | NM_003754.1 | EIF3S5 | 175.2963427 | 1.186295643 | 0.002708745 |
| 119 | 6350376 | 24234684 | NM_006597.3 | HSPA8 | 245.6853166 | 1.206537243 | 0.002730009 |
| 120 | 2070152 | 32130534 | NM_017801.2 | CMTM6 | −188.8631566 | 0.768636189 | 0.002746935 |
| 121 | 6650020 | 4501944 | NM_001124.1 | ADM | −270.3778539 | 0.770943537 | 0.002748971 |
| 122 | 5720458 | 8051633 | NM_004585.2 | RARRES3 | 228.1363976 | 1.255356881 | 0.002841093 |
| 123 | 5720347 | 14589868 | NM_032966.1 | BLR1 | 33.77133084 | 1.352619823 | 0.002843529 |
| 124 | 4890192 | 21396481 | NM_003512.3 | HIST1H2AC | −112.3541472 | 0.718192715 | 0.002850535 |
| 125 | 940348 | 21614521 | NM_012198.2 | GCA | −659.6345279 | 0.731881578 | 0.002891609 |
| 126 | 2750626 | 25453476 | NM_001961.2 | EEF2 | 556.3584728 | 1.181343779 | 0.002930668 |
| 127 | 1780035 | 31377794 | NM_006888.2 | CALM1 | 119.0389403 | 1.140092427 | 0.002955045 |
| 128 | 840564 | 23510386 | NM_153050.1 | MTMR3 | −134.6471185 | 0.837440801 | 0.002971284 |
| 129 | 6270128 | 58331233 | NM_000074.2 | CD40LG | 19.30987052 | 1.299106772 | 1.76E−05 |
| 130 | 2630484 | 88986422 | XM_927593.1 | ATP10B | −3.310535431 | 0.927138841 | 1.93E−05 |
| 131 | 520332 | 22165415 | NM_000155.2 | GALT | 15.96763751 | 1.182575744 | 2.05E−05 |
| 132 | 4730195 | 21264599 | NM_003543.3 | HIST1H4H | −35.48000424 | 0.721118446 | 2.49E−05 |
| 133 | 3120301 | 51173749 | NM_031488.4 | L3MBTL2 | 23.21749718 | 1.214091824 | 4.02E−05 |
| 134 | 6110768 | 39725714 | NM_004044.4 | ATIC | 72.99433158 | 1.297103547 | 4.63E−05 |
| 135 | 7150634 | 5902011 | NM_006901.1 | MYO9A | 15.79647532 | 1.176790608 | 4.89E−05 |
| 136 | 6590386 | 20149679 | NM_024619.2 | FN3KRP | 63.48415847 | 1.276544672 | 4.98E−05 |
| 137 | 5690037 | 31543829 | NM_013270.2 | TSP50 | −4.520475047 | 0.914368497 | 5.40E−05 |
| 138 | 4540082 | 58331160 | NM_015651.1 | PHF19 | 27.47614989 | 1.23686341 | 7.56E−05 |
| 139 | 6380598 | 15529981 | NM_033416.1 | IMP4 | 34.49530681 | 1.205303684 | 7.96E−05 |
| 140 | 3520192 | 47132578 | NM_004401.2 | DFFA | 13.05479272 | 1.196479136 | 7.97E−05 |
| 141 | 2450497 | 314309 | T03068 | | 2.937619578 | 1.076034692 | 9.15E−05 |
| 142 | 7320576 | 4503512 | NM_003757.1 | EIF3S2 | 92.09473895 | 1.176647021 | 0.000308301 |
| 143 | 1300768 | 24497575 | NM_006066.2 | AKR1A1 | 80.92050915 | 1.237851126 | 0.000645996 |
| 144 | 5890327 | 24497579 | NM_001628.2 | AKR1B1 | 83.65924065 | 1.273311325 | 0.000719704 |
| 145 | 460273 | 35493970 | NM_003345.3 | UBE2I | 90.10026341 | 1.134131115 | 0.001168429 |
| 146 | 4920577 | 76781490 | NM_007047.3 | BTN3A2 | 93.80802363 | 1.266607439 | 0.001191858 |
| 147 | 650358 | 71773149 | NM_000485.2 | APRT | 84.63692212 | 1.280817312 | 0.001674124 |
| 148 | 1190647 | 18375504 | NM_080649.1 | APEX1 | 89.44973593 | 1.233840385 | 0.001687003 |
| 149 | 5960301 | 38026968 | NM_004649.4 | C21orf33 | 84.66892254 | 1.184726723 | 0.001806028 |
| 150 | 6290239 | 33469921 | NM_182776.1 | MCM7 | 85.43037244 | 1.23369979 | 0.002059443 |
| 151 | 4280373 | 11496980 | NM_003174.2 | SVIL | −86.77630886 | 0.817298661 | 0.002251248 |
| 152 | 5570750 | 31742497 | NM_015374.1 | UNC84B | 95.70834076 | 1.215821376 | 0.002516183 |
| 153 | 1780152 | 68161540 | NM_001024912.1 | CEACAM1 | −98.14974577 | 0.731931222 | 0.00292068 |
| 154 | 5390131 | 33469915 | NM_003906.3 | MCM3AP | 32.02638688 | 1.143678564 | 0.000106053 |
| 155 | 1240603 | 34452172 | NM_000887.3 | ITGAX | −22.98226817 | 0.818214716 | 0.000107483 |
| 156 | 2190673 | 41281472 | NM_014738.2 | KIAA0195 | 45.96224495 | 1.262020095 | 0.000110774 |
| 157 | 1580348 | 25141321 | NM_015039.2 | NMNAT2 | 6.84304916 | 1.124383533 | 0.000120767 |
| 158 | 4220138 | 89057421 | XM_940198.1 | LOC651076 | 10.13757955 | 1.165397115 | 0.000128251 |
| 159 | 3610504 | 38788307 | NM_005476.3 | GNE | 18.30602894 | 1.161672234 | 0.000133964 |
| 160 | 3520082 | 4506752 | NM_003707.1 | RUVBL1 | 11.02056207 | 1.158636454 | 0.000135201 |
| 161 | 7160296 | 70980548 | NM_014976.1 | PDCD11 | 21.33989507 | 1.221159345 | 0.000135859 |
| 162 | 1050128 | 8515897 | AF272739 | | 5.425986954 | 1.113600395 | 0.000136921 |
| 163 | 4730577 | 39890659 | CK300859 | | −3.693681288 | 0.918211879 | 0.000137667 |
| 164 | 5910091 | 30425443 | NM_178510.1 | ANKK1 | 2.967139784 | 1.069192658 | 0.000157493 |
| 165 | 1430292 | 40254427 | NM_000578.2 | SLC11A1 | −53.76208405 | 0.700846833 | 0.000167687 |
| 166 | 3460189 | 31652246 | NM_139244.2 | STXBP5 | −30.43225917 | 0.777631906 | 0.000172103 |
| 167 | 3140093 | 47717138 | NM_006767.2 | LZTR1 | 65.30433309 | 1.271997612 | 0.000186989 |
| 168 | 1440601 | 28872781 | NM_016408.2 | CDK5RAP1 | 25.2613611 | 1.174006584 | 0.000202701 |
| 169 | 3830390 | 89035828 | XM_930898.1 | KIAA0692 | −2.717873701 | 0.926116051 | 0.000205305 |
| 170 | 5860196 | 23659890 | BU733214 | | −2.809152673 | 0.934353946 | 0.000218212 |
| 171 | 3420735 | 40556369 | NM_015288.4 | PHF15 | 69.78943303 | 1.295589549 | 0.000222283 |
| 172 | 7050543 | 32967306 | NM_182480.1 | COQ6 | 13.29427898 | 1.129169056 | 0.000225323 |
| 173 | 5290289 | 34147412 | NM_032312.2 | YIPF4 | −50.40343731 | 0.765323005 | 0.000234467 |
| 174 | 6590523 | 56119213 | NM_024711.3 | GIMAP6 | 61.57201639 | 1.19443786 | 0.000236996 |
| 175 | 6020402 | 24497619 | NM_014230.2 | SRP68 | 28.09091984 | 1.155068368 | 0.000260218 |
| 176 | 5550746 | 63029931 | NM_152272.2 | CHMP7 | 43.03363654 | 1.222857885 | 0.00026052 |
| 177 | 160736 | 7706484 | NM_016292.1 | TRAP1 | 20.89088823 | 1.24310651 | 0.000270249 |
| 178 | 3840022 | 12707569 | NM_004092.2 | ECHS1 | 48.95693214 | 1.230257197 | 0.000274708 |
| 179 | 20647 | 40807451 | NM_015062.3 | PPRC1 | 20.40411099 | 1.172512955 | 0.000283424 |
| 180 | 3370687 | 16445420 | NM_052837.1 | SCAMP3 | 67.26265306 | 1.266481175 | 0.000291089 |
| 181 | 5310754 | 55956897 | NM_015935.4 | KIAA0859 | 13.16095145 | 1.140721813 | 0.000296022 |
| 182 | 2710397 | 24497489 | NM_003059.2 | SLC22A4 | −40.49246287 | 0.777411881 | 0.000298583 |
| 183 | 4850541 | 75750528 | NM_016552.2 | ANKMY1 | 2.735334806 | 1.065736829 | 0.000317215 |
| 184 | 6100220 | 6005951 | NM_007255.1 | B4GALT7 | 29.14447929 | 1.228247363 | 0.000318886 |
| 185 | 10541 | 13194198 | NM_023003.1 | TM6SF1 | −42.63413583 | 0.75244874 | 0.000319057 |
| 186 | 5720398 | 31341089 | NM_173791.2 | PDZD8 | −20.13545497 | 0.805850726 | 0.000321296 |
| 187 | 4540301 | 45827722 | NM_206914.1 | DKFZP586D0919 | 11.93196859 | 1.166543095 | 0.000322081 |
| 188 | 2100035 | 31543661 | NM_004226.2 | STK17B | −56.28618761 | 0.726985134 | 0.000323173 |
| 189 | 5090477 | 20336255 | NM_138687.1 | PIP5K2B | 4.198748845 | 1.077633516 | 0.000323344 |
| 190 | 130403 | 56550113 | NM_006567.2 | FARS2 | 15.61874075 | 1.144473414 | 0.000328093 |
| 191 | 5390669 | 5453556 | NM_006321.1 | ARIH2 | 43.41521242 | 1.16984795 | 0.000330449 |
| 192 | 2760563 | 77404351 | NM_001414.2 | EIF2B1 | 26.53165567 | 1.152983904 | 0.000332202 |
| 193 | 1440382 | 33359700 | NM_182688.1 | UBE2G2 | 39.95896434 | 1.258246254 | 0.000339206 |
| 194 | 2260446 | 89027447 | XM_935843.1 | LOC653832 | −3.084729823 | 0.927141 | 0.000346447 |
| 195 | 2030544 | 89026490 | XM_936353.1 | LOC642196 | 6.598817511 | 1.139296555 | 0.000346604 |
| 196 | 1440546 | 73486657 | NM_002080.2 | GOT2 | 48.7873308 | 1.230560635 | 0.00035799 |
| 197 | 5270500 | 16936531 | NM_000075.2 | CDK4 | 39.00645813 | 1.28126712 | 0.000367439 |
| 198 | 2750408 | 88971019 | XM_939707.1 | RUVBL1 | 16.22168355 | 1.191413103 | 0.000375432 |
| 199 | 6980274 | 16199327 | BI915661 | | 3.572189393 | 1.088541696 | 0.000376532 |
| 200 | 4200538 | 7657121 | NM_015721.1 | GEMIN4 | 29.79545919 | 1.244092425 | 0.000387475 |
| 201 | 6550142 | 6552335 | NM_003819.2 | PABPC4 | 43.32832748 | 1.217948334 | 0.000387574 |
| 202 | 7000408 | 13376877 | NM_025263.1 | PRR3 | 10.71405587 | 1.132753454 | 0.000391734 |
| 203 | 3140246 | 40255000 | NM_033111.2 | LOC88523 | −78.75175311 | 0.776953228 | 0.000391929 |
| 204 | 4230653 | 24497586 | NM_139247.2 | ADCY4 | −35.6351327 | 0.787114348 | 0.000397239 |
| 205 | 3420343 | 46409267 | NM_207311.1 | CCDC64 | 30.70426568 | 1.287470221 | 0.00040278 |
| 206 | 4150402 | 2963496 | AA868051 | | 2.919731911 | 1.06730094 | 0.000407376 |
| 207 | 2100333 | 38683839 | NM_198196.1 | CD96 | 51.45503197 | 1.281782623 | 0.000407931 |
| 208 | 4150161 | 4502676 | NM_001779.1 | CD58 | −48.65350702 | 0.744869256 | 0.000410831 |
| 209 | 4880364 | 13129091 | NM_024092.1 | TMEM109 | 61.87509923 | 1.260473608 | 0.0004333 |
| 210 | 2230661 | 20428651 | NM_005356.2 | LCK | 28.15648785 | 1.240489001 | 0.000447815 |
| 211 | 2450343 | 27828388 | BX096685 | | 4.718261846 | 1.099375057 | 0.000459923 |
| 212 | 6840408 | 2354214 | AA576740 | | 2.46572254 | 1.061515186 | 0.000464263 |
| 213 | 3140039 | 21314659 | NM_016230.2 | CYB5R4 | −69.25618425 | 0.757186116 | 0.000474673 |
| 214 | 2900524 | 41352701 | NM_001384.3 | DPH2 | 30.82374927 | 1.211102665 | 0.000489612 |
| 215 | 6480170 | 52632380 | NM_001005333.1 | MAGED1 | 44.33620059 | 1.280407525 | 0.000496684 |
| 216 | 4120133 | 31542722 | NM_022827.2 | SPATA20 | 22.43434012 | 1.234512657 | 0.000496736 |
| 217 | 4780743 | 4885224 | NM_005243.1 | EWSR1 | 65.31825131 | 1.149756619 | 0.000520842 |
| 218 | 7150601 | 7661785 | NM_014165.1 | C6orf66 | 6.495115777 | 1.112031506 | 0.000522811 |
| 219 | 5310050 | 12232384 | NM_022730.1 | COPS7B | 20.43313854 | 1.159974145 | 0.000523392 |
| 220 | 3130091 | 46358357 | NM_017905.3 | TMCO3 | −52.34722897 | 0.774257356 | 0.000525503 |
| 221 | 4860132 | 7662451 | NM_015239.1 | AGTPBP1 | −78.07936872 | 0.798836295 | 0.000529903 |
| 222 | 3780689 | 70608210 | NM_016489.11 | NT5C3 | −33.80520978 | 0.771229 | 0.000530225 |
| 223 | 1030692 | 27436906 | NM_004927.2 | MRPL49 | 41.36497592 | 1.196106353 | 0.000541915 |
| 224 | 4830435 | 39812071 | NM_030811.3 | MRPS26 | 24.14041112 | 1.209465158 | 0.000546594 |
| 225 | 4830563 | 33620778 | NM_012321.2 | LSM4 | 46.65393084 | 1.19050163 | 0.000557036 |
| 226 | 3940368 | 89057924 | XM_928933.1 | FLJ32154 | 2.730511524 | 1.07060656 | 0.000558628 |
| 227 | 1980424 | 13129119 | NM_024108.1 | TRAPPC6A | 30.5100061 | 1.204130632 | 0.000560504 |
| 228 | 3130711 | 22748936 | NM_020750.1 | XPO5 | 12.09222819 | 1.135424285 | 0.000572639 |
| 229 | 620722 | 4506444 | NM_002896.1 | RBM4 | 43.5385138 | 1.203671935 | 0.000578613 |
| 230 | 3400504 | 66933015 | NM_000884.2 | IMPDH2 | 69.11593701 | 1.25700787 | 0.000583684 |
| 231 | 2750521 | 57634533 | NM_015135.1 | NUP205 | 29.42766456 | 1.221266897 | 0.000585225 |
| 232 | 4060056 | 55749643 | NM_015054.1 | KIAA0701 | −12.83668481 | 0.883051575 | 0.000597219 |
| 233 | 4640044 | 21040335 | NM_138931.1 | BCL6 | −5.775066733 | 0.890317809 | 0.00060429 |
| 234 | 6110537 | 88967388 | XM_931928.1 | LOC642816 | 2.637522553 | 1.065666772 | 0.000612974 |
| 235 | 4640528 | 13435126 | NM_025228.1 | TRAF3IP3 | 75.87438371 | 1.216408031 | 0.000615875 |
| 236 | 5860400 | 19557649 | NM_021052.2 | HIST1H2AE | −11.74106542 | 0.820379932 | 0.000618118 |
| 237 | 990273 | 34222323 | NM_015380.3 | SAMM50 | 47.44338392 | 1.204119339 | 0.00063726 |
| 238 | 3990465 | 89038158 | XM_496059.2 | LOC440261 | 2.890329302 | 1.065568707 | 0.000641851 |
| 239 | 4860296 | 42558244 | NM_032320.4 | BTBD10 | −25.33553958 | 0.830860508 | 0.000644443 |
| 240 | 1110358 | 27469749 | BC041984 | | −5.896873872 | 0.901523403 | 0.000669438 |
| 241 | 5130767 | 52352808 | NM_005902.3 | SMAD3 | 27.20027806 | 1.165895949 | 0.00067007 |
| 242 | 6980609 | 40255221 | NM_178839.3 | LRRTM1 | −3.098540364 | 0.930415728 | 0.000677469 |
| 243 | 2630719 | 57222567 | NM_005937.2 | MLLT6 | 67.91872541 | 1.270330562 | 0.000681074 |
| 244 | 7380274 | 68509917 | NM_007167.2 | ZMYM6 | 52.66472418 | 1.182129748 | 0.000687399 |
| 245 | 6480328 | 39725684 | NM_025150.3 | TARSL1 | 6.593485366 | 1.123027001 | 0.000690243 |
| 246 | 5820348 | 48314819 | NM_017570.1 | OPLAH | −45.18509526 | 0.713924556 | 0.000703103 |
| 247 | 130113 | 56699400 | NM_052901.2 | SLC25A25 | 18.42042548 | 1.167822465 | 0.000707163 |
| 248 | 6860243 | 24430138 | NM_015540.2 | RPAP1 | 7.937422972 | 1.134855062 | 0.00071637 |
| 249 | 5900414 | 5031814 | NM_005548.1 | KARS | 23.41578115 | 1.134554539 | 0.000730069 |
| 250 | 1340338 | 89041598 | XM_377476.3 | MGC57346 | 17.93153367 | 1.232438001 | 0.000733975 |
| 251 | 2850576 | 68160936 | NM_005082.4 | TRIM25 | −23.69158863 | 0.821748384 | 0.000737703 |
| 252 | 6960328 | 75677605 | NM_001033515.1 | LOC389833 | 5.635808116 | 1.113339339 | 0.000738593 |
| 253 | 20224 | 47894448 | NM_206967.1 | MGC17624 | 5.464481452 | 1.099129587 | 0.000741223 |
| 254 | 4560463 | 4290896 | AI433683 | | −4.20815397 | 0.91832369 | 0.000764668 |
| 255 | 5490142 | 50363239 | NM_002685.2 | EXOSC10 | 64.67454838 | 1.261126978 | 0.000769548 |
| 256 | 240653 | 19603939 | BM981444 | | −2.329460443 | 0.946403267 | 0.000785871 |
| 257 | 2750070 | 18375517 | NM_001854.2 | COL11A1 | −3.554107591 | 0.934385923 | 0.000788658 |
| 258 | 6020575 | 14249551 | NM_032839.1 | DIRC2 | −35.91490208 | 0.820367822 | 0.000797516 |
| 259 | 3710189 | 38201688 | NM_002883.2 | RANGAP1 | 65.259255 | 1.257018161 | 0.000797921 |
| 260 | 2710278 | 52851445 | NM_005412.4 | SHMT2 | 65.41415964 | 1.2526449 | 0.000800169 |
| 261 | 360343 | 17105402 | NM_005103.3 | FEZ1 | 12.70533853 | 1.203271429 | 0.00082364 |
| 262 | 2690576 | 55953121 | NM_015705.4 | RUTBC3 | 14.20156258 | 1.166207066 | 0.00084996 |
| 263 | 2120681 | 13376061 | NM_024740.1 | ALG9 | 12.03252127 | 1.167495262 | 0.000852968 |
| 264 | 1410369 | 41350203 | NM_016286.2 | DCXR | 36.20150781 | 1.200362836 | 0.000857671 |
| 265 | 4850438 | 39777595 | NM_021809.4 | TGIF2 | 16.93614892 | 1.169575173 | 0.000858382 |
| 266 | 7100392 | 16753208 | NM_017481.2 | UBQLN3 | 4.445833834 | 1.083359837 | 0.000865917 |
| 267 | 1340731 | 21361349 | NM_006643.2 | SDCCAG3 | 29.22941312 | 1.187927522 | 0.00086772 |
| 268 | 2450603 | 32967290 | NM_181803.1 | UBE2C | −13.65767785 | 0.824486907 | 0.000875883 |
| 269 | 3390458 | 25777636 | NM_002243.3 | KCNJ15 | −68.77822725 | 0.761196715 | 0.000892396 |
| 270 | 1990673 | 52851448 | NM_173659.2 | RPUSD3 | 26.38750171 | 1.177225317 | 0.000894737 |
| 271 | 4150632 | 21618346 | NM_002756.2 | MAP2K3 | 3.058914147 | 1.065607186 | 0.000899878 |
| 272 | 130451 | 10835100 | NM_021078.1 | GCN5L2 | 45.23903059 | 1.24691539 | 0.000902329 |
| 273 | 10338 | 72534727 | NM_001031717.1 | CRELD1 | 22.42405663 | 1.23243055 | 0.000913686 |
| 274 | 1500040 | 30581134 | NM_006306.2 | SMC1L1 | 7.353409474 | 1.122782283 | 0.00092398 |
| 275 | 730725 | 40068037 | NM_016524.2 | SYT17 | 3.962856298 | 1.08382056 | 0.000932685 |
| 276 | 3800270 | 4757937 | NM_000648.1 | CCR2 | −2.41229231 | 0.939356527 | 0.000934322 |
| 277 | 5090204 | 7661547 | NM_015702.1 | C2orf25 | −79.93887985 | 0.842935199 | 0.000959059 |
| 278 | 3170468 | 7706726 | NM_016089.1 | ZNF589 | 28.88231896 | 1.256897786 | 0.000963048 |
| 279 | 50164 | 41281436 | NM_014669.2 | NUP93 | 28.51197413 | 1.174573985 | 0.000965886 |
| 280 | 4050411 | 34222200 | NM_153329.2 | ALDH16A1 | 53.51905541 | 1.260140642 | 0.000966212 |
| 281 | 380315 | 7705725 | NM_015959.1 | TXNDC14 | 36.56045278 | 1.18069957 | 0.000967375 |
| 282 | 6650541 | 70980545 | NM_176880.4 | TRA16 | 14.18996137 | 1.190005746 | 0.000987075 |
| 283 | 1440291 | 14589867 | NM_001716.2 | BLR1 | 4.157558649 | 1.091968062 | 0.00099509 |
| 284 | 4880373 | 27842881 | BX096603 | | 10.23388569 | 1.158997206 | 0.000998463 |
| 285 | 2120356 | 39888074 | CK299581 | | 2.430006552 | 1.065215654 | 0.001020522 |
| 286 | 160682 | 54112120 | NM_012426.3 | SF3B3 | 44.15684822 | 1.219213777 | 0.001029969 |
| 287 | 4280047 | 34577088 | NM_183382.1 | RNF13 | −75.68323448 | 0.750155587 | 0.001037306 |
| 288 | 1740576 | 41281526 | NM_014871.2 | USP52 | 19.95561799 | 1.213504932 | 0.001055174 |
| 289 | 2480082 | 35493922 | NM_006031.3 | PCNT2 | 29.27063181 | 1.159621239 | 0.001070467 |
| 290 | 6110328 | 23111065 | NM_003645.2 | SLC27A2 | −4.068829061 | 0.923612267 | 0.001075869 |
| 291 | 6660056 | 13743863 | BG217842 | | −33.02507288 | 0.769709246 | 0.001076096 |
| 292 | 1500717 | 73765543 | NM_000314.3 | PTEN | −65.04739132 | 0.804962827 | 0.001088331 |
| 293 | 7330487 | 52485986 | NM_002566.4 | P2RY11 | 28.34353619 | 1.266107577 | 0.00109239 |
| 294 | 2510324 | 7253951 | AW578902 | | −5.837784587 | 0.909758543 | 0.001097496 |
| 295 | 2760110 | 31542241 | NM_017917.2 | C14orf10 | −58.83249801 | 0.816539548 | 0.001102809 |
| 296 | 3140142 | 32698741 | NM_020925.1 | CACHD1 | −2.700091737 | 0.936782452 | 0.001113125 |
| 297 | 6400563 | 14150188 | NM_032369.1 | MGC15619 | 27.91382697 | 1.187624618 | 0.001114572 |
| 298 | 7000768 | 63003900 | NM_017773.2 | LAX1 | 36.42003819 | 1.258339525 | 0.001121704 |
| 299 | 2030450 | 6912355 | NM_012155.1 | EML2 | 42.34533266 | 1.168946841 | 0.001122558 |
| 300 | 3930687 | 71061448 | NM_024326.2 | FBXL15 | 41.8339122 | 1.225791909 | 0.00112491 |
| 301 | 770452 | 89029874 | XM_928878.1 | LOC392364 | 3.076035108 | 1.070389607 | 0.001136035 |
| 302 | 4390615 | 19924152 | NM_138557.1 | TLR4 | −47.03190471 | 0.76415391 | 0.001140352 |
| 303 | 2190524 | 46370053 | NM_019011.4 | TRIAD3 | 24.07686324 | 1.177162245 | 0.001145386 |
| 304 | 5360674 | 32455240 | NM_178232.2 | HAPLN3 | 17.16381664 | 1.244549462 | 0.001189577 |
| 305 | 4760364 | 62912469 | NM_001017403.1 | LGR6 | 15.47756491 | 1.23125561 | 0.001208655 |
| 306 | 4150768 | 7661817 | NM_014181.1 | HSPC159 | −19.17476534 | 0.78372152 | 0.001216429 |
| 307 | 2970332 | 50593004 | NM_006328.2 | RBM14 | 73.69517521 | 1.214022777 | 0.001227948 |
| 308 | 2370341 | 88982372 | XM_932015.1 | LOC643401 | 2.094536796 | 1.05887807 | 0.001232055 |
| 309 | 940754 | 7657332 | NM_014358.1 | CLEC4E | −29.11656126 | 0.74583825 | 0.00124297 |
| 310 | 1090048 | 48976062 | NM_153611.3 | CYBASC3 | 49.70244398 | 1.217479345 | 0.001247126 |
| 311 | 5910343 | 88953692 | XM_929793.1 | LOC646836 | 6.392732823 | 1.113777423 | 0.001249592 |
| 312 | 2810674 | 88970691 | XM_942926.1 | LOC647649 | 2.321532121 | 1.054742893 | 0.001252869 |
| 313 | 6350017 | 4505462 | NM_003632.1 | CNTNAP1 | 8.432099288 | 1.161986349 | 0.001272112 |
| 314 | 2000390 | 32130539 | NM_012395.2 | PFTK1 | −11.44388985 | 0.844274751 | 0.001272449 |
| 315 | 360402 | 12383073 | NM_022830.1 | RBM21 | 12.81737281 | 1.157133003 | 0.001289751 |
| 316 | 6270364 | 77157783 | NM_015044.3 | GGA2 | 54.90600546 | 1.283424211 | 0.001302584 |
| 317 | 7510224 | 89037451 | XM_929560.1 | ACOT1 | 5.220050681 | 1.097059274 | 0.001314489 |
| 318 | 3850025 | 21536366 | NM_139353.1 | TAF1C | 75.95063347 | 1.204746923 | 0.001320044 |
| 319 | 2640373 | 71040087 | NM_000449.3 | RFX5 | 40.58475673 | 1.195639991 | 0.001352801 |
| 320 | 1940543 | 62243651 | NM_001013848.1 | EXOC6 | −35.01537314 | 0.76458234 | 0.001357439 |
| 321 | 1820142 | 34147665 | NM_006374.3 | STK25 | 30.72099994 | 1.157095215 | 0.001358231 |
| 322 | 1470332 | 21450778 | NM_145036.1 | MGC33887 | 2.451633821 | 1.057340207 | 0.001380734 |
| 323 | 2070241 | 23397461 | NM_153211.1 | C18orf17 | 26.57907091 | 1.195520367 | 0.001380825 |
| 324 | 6200746 | 39725655 | NM_032376.2 | TMEM101 | 20.79524943 | 1.135857258 | 0.001392087 |
| 325 | 5130154 | 2115625 | AA431917 | | 2.687068685 | 1.060681089 | 0.001397186 |
| 326 | 7650605 | 13489098 | NM_024681.1 | KCTD17 | 42.15691645 | 1.219877312 | 0.001398325 |
| 327 | 990224 | 40538798 | NM_020131.3 | UBQLN4 | 44.15987403 | 1.241656798 | 0.001409781 |
| 328 | 6110142 | 21389554 | NM_144666.1 | DNHD1 | 10.18272952 | 1.176487041 | 0.001414669 |
| 329 | 520154 | 34527067 | AK130294 | | 21.74202891 | 1.237530114 | 0.001416293 |
| 330 | 2650164 | 57164941 | NM_001008938.1 | CKAP5 | 29.33938351 | 1.191276253 | 0.001417373 |
| 331 | 6370463 | 89047258 | XM_925913.1 | LOC653063 | 2.808209897 | 1.065349534 | 0.00141842 |
| 332 | 6020500 | 27477133 | NM_024923.2 | NUP210 | 37.64775789 | 1.196401091 | 0.001418525 |
| 333 | 7380328 | 11141876 | NM_021805.1 | SIGIRR | 25.06501581 | 1.245654007 | 0.001427724 |
| 334 | 4200451 | 88983572 | XM_068632.5 | LOC133993 | 3.341967043 | 1.065344844 | 0.001430887 |
| 335 | 1430156 | 13129099 | NM_024096.1 | XTP3TPA | 21.55693285 | 1.173886359 | 0.001430912 |
| 336 | 2490747 | 4501840 | NM_001605.1 | AARS | 77.76894401 | 1.276356344 | 0.001432837 |
| 337 | 1010612 | 31542677 | NM_031206.2 | LAS1L | 12.21303662 | 1.172490221 | 0.001437935 |
| 338 | 2630181 | 38570053 | NM_020408.3 | C6orf149 | 8.470600619 | 1.14906581 | 0.001455672 |
| 339 | 1450082 | 29789121 | NM_021117.1 | CRY2 | 17.52300597 | 1.161214169 | 0.001456531 |
| 340 | 3940020 | 38149169 | CF887308 | | 2.194774646 | 1.057872899 | 0.001465205 |
| 341 | 2970440 | 51592099 | NM_014675.2 | CROCC | 5.396550969 | 1.094770922 | 0.001466061 |
| 342 | 3990192 | 6912279 | NM_012111.1 | AHSA1 | 28.18197892 | 1.15069417 | 0.001481716 |
| 343 | 3830278 | 12751496 | NM_023080.1 | C8orf33 | 11.18572632 | 1.129068947 | 0.001502437 |
| 344 | 2070131 | 22035596 | NM_031420.2 | MRPL9 | 31.85307452 | 1.167431606 | 0.001511617 |
| 345 | 6040259 | 31652258 | NM_032853.2 | MUM1 | 21.48103217 | 1.229453813 | 0.001518048 |
| 346 | 650014 | 37237779 | CF619198 | | 2.327816537 | 1.063259079 | 0.0015214 |
| 347 | 1690504 | 27831422 | BX101820 | | 2.143929406 | 1.056737612 | 0.00152161 |
| 348 | 5080056 | 39841072 | NM_018079.3 | FLJ10379 | −24.26466131 | 0.832390434 | 0.001525093 |
| 349 | 7100504 | 39652617 | NM_004623.2 | TTC4 | 36.08459854 | 1.184629696 | 0.001561337 |
| 350 | 5890273 | 21071040 | NM_014141.3 | CNTNAP2 | 6.595271148 | 1.146748332 | 0.001599007 |
| 351 | 7610546 | 40255053 | NM_032717.3 | HMFN0839 | −54.94911949 | 0.781061678 | 0.001603755 |
| 352 | 6020132 | 41281777 | NM_152943.1 | ZNF268 | 2.648966818 | 1.059765454 | 0.001607376 |
| 353 | 6110133 | 15042936 | NM_007365.1 | PADI2 | −9.370076681 | 0.86480149 | 0.001614081 |
| 354 | 2000474 | 17965839 | BM272556 | | −2.55867557 | 0.936510151 | 0.001622817 |
| 355 | 2030747 | 34222148 | NM_032138.3 | KBTBD7 | −29.27404586 | 0.760659869 | 0.001628042 |
| 356 | 5560093 | 34531894 | AK125708 | | 3.295857766 | 1.075280337 | 0.001644271 |
| 357 | 610465 | 41393562 | NM_015074.2 | KIF1B | −69.35956203 | 0.733288248 | 0.001645719 |
| 358 | 3400372 | 53692181 | NM_015002.2 | FBXO21 | 26.3299661 | 1.15897828 | 0.001663991 |
| 359 | 6580075 | 20149575 | NM_006164.2 | NFE2L2 | −62.000525 | 0.78335815 | 0.001666828 |
| 360 | 5130747 | 23238724 | BU587445 | | 5.206540958 | 1.107947177 | 0.001673048 |
| 361 | 6650576 | 24787676 | CA424950 | | 2.962661443 | 1.070519384 | 0.001676488 |
| 362 | 4120086 | 13569871 | NM_030915.1 | LBH | 4.189390797 | 1.079490285 | 0.001706774 |
| 363 | 3130019 | 20143980 | NM_014234.3 | HSD17B8 | 21.75170555 | 1.196488957 | 0.001711828 |
| 364 | 4200148 | 42660194 | XM_378421 | | 14.16364107 | 1.189819518 | 0.001713891 |
| 365 | 940706 | 88989505 | XM_939144.1 | LOC650058 | 2.002405673 | 1.048229223 | 0.001739768 |
| 366 | 20553 | 42789728 | NM_006152.2 | LRMP | −74.82036091 | 0.849300145 | 0.001740334 |
| 367 | 5550270 | 27838297 | BX113537 | | 3.941936997 | 1.086914048 | 0.00175354 |
| 368 | 4570612 | 51477715 | NM_006122.2 | MAN2A2 | −44.39209005 | 0.795587215 | 0.001768914 |
| 369 | 3390008 | 24475884 | NM_003475.2 | RASSF7 | 57.42044838 | 1.233262979 | 0.001787024 |
| 370 | 4730088 | 50484029 | CR603222 | | 3.836354648 | 1.077928085 | 0.001799439 |
| 371 | 670376 | 38158012 | NM_182830.2 | MAMDC1 | 2.798906913 | 1.068655473 | 0.0018053 |
| 372 | 7400431 | 24234746 | NM_004515.2 | ILF2 | 63.52810868 | 1.160207487 | 0.001806039 |
| 373 | 520360 | 40254941 | NM_020448.2 | NPAL3 | 20.03362452 | 1.165178541 | 0.00181287 |
| 374 | 1240440 | 48762680 | NM_000701.6 | ATP1A1 | 37.53285116 | 1.204524584 | 0.001815625 |
| 375 | 6380358 | 73912719 | NM_001032363.1 | C1orf151 | 3.003480865 | 1.065127964 | 0.001856986 |
| 376 | 7400240 | 50541941 | NM_000488.2 | SERPINC1 | 2.88345468 | 1.067256547 | 0.001886392 |
| 377 | 6110672 | 68303646 | NM_001025077.1 | CUGBP2 | −49.70921613 | 0.826255573 | 0.001902574 |
| 378 | 7050196 | 88988812 | XM_943393.1 | LOC647784 | 2.371716902 | 1.058914165 | 0.001918129 |
| 379 | 1070377 | 66346718 | NM_207106.2 | UIP1 | 32.34029956 | 1.192004187 | 0.0019244 |
| 380 | 50347 | 57862814 | NR_002196.1 | H19 | 4.098623993 | 1.09014366 | 0.001939512 |
| 381 | 6510452 | 7794142 | AW779539 | | 2.742193271 | 1.058591264 | 0.001982133 |
| 382 | 5130142 | 50301239 | NM_001001998.1 | EXOSC10 | 23.91241934 | 1.189832508 | 0.001984951 |
| 383 | 6770142 | 37693992 | NM_002513.2 | NME3 | 51.08647128 | 1.205555171 | 0.001991096 |
| 384 | 3400176 | 39725947 | NM_015517.3 | MIZF | 13.64333077 | 1.107326504 | 0.001995042 |
| 385 | 610653 | 4826650 | NM_004928.1 | C21orf2 | 33.52242941 | 1.236381199 | 0.001998985 |
| 386 | 3940386 | 39995110 | NM_000849.3 | GSTM3 | 8.079852703 | 1.155645076 | 0.002004006 |
| 387 | 2100519 | 54144638 | NM_006469.4 | IVNS1ABP | −63.08035217 | 0.81392201 | 0.002018303 |
| 388 | 5130553 | 19001887 | BM688622 | | 2.603201451 | 1.065274697 | 0.002038439 |
| 389 | 5690008 | 4885584 | NM_005500.1 | SAE1 | 75.82328648 | 1.157051883 | 0.002042091 |
| 390 | 7160164 | 40354200 | NM_199184.1 | C6orf108 | 26.45996909 | 1.188835551 | 0.002055282 |
| 391 | 4610619 | 34147351 | NM_024046.2 | CAMKV | −3.847147069 | 0.927934773 | 0.002074291 |
| 392 | 4010673 | 38149909 | NM_198138.1 | SEC31L2 | 10.15672126 | 1.132559406 | 0.00207951 |
| 393 | 3780220 | 8922497 | NM_018129.1 | PNPO | 47.19395989 | 1.242699483 | 0.002083951 |
| 394 | 3440040 | 88989998 | XM_944927.1 | LOC649242 | −2.349265137 | 0.942740447 | 0.002090613 |
| 395 | 6040639 | 4757733 | NM_004833.1 | AIM2 | −39.37522134 | 0.756948245 | 0.002136117 |
| 396 | 430100 | 34222094 | NM_012212.2 | LTB4DH | −2.891199796 | 0.93528499 | 0.002137898 |
| 397 | 5270450 | 31004095 | CD243631 | | −2.682928323 | 0.934932365 | 0.002141697 |
| 398 | 4900497 | 18979657 | BM669760 | | 2.394474482 | 1.055793869 | 0.002144886 |
| 399 | 6250338 | 22748798 | NM_152371.1 | C1orf93 | 20.43951257 | 1.20374194 | 0.002146632 |
| 400 | 5720424 | 54607107 | NM_031449.3 | DKFZp761I2123 | 28.39880817 | 1.24615102 | 0.002146928 |
| 401 | 5570632 | 51587022 | CR738137 | | −3.700734709 | 0.919525529 | 0.002155079 |
| 402 | 2650152 | 29789109 | NM_020698.1 | TMCC3 | −29.36456043 | 0.795720773 | 0.002157529 |
| 403 | 5390100 | 42544135 | NM_015713.3 | RRM2B | −28.5915367 | 0.768583225 | 0.002165583 |
| 404 | 6380050 | 74229007 | NM_001032999.1 | CBFA2T2 | 3.841545355 | 1.0857201 | 0.002166999 |
| 405 | 4260053 | 19747275 | NM_133325.1 | PHF10 | 49.7681192 | 1.179062329 | 0.002169686 |
| 406 | 4810327 | 2046104 | AA393134 | | −2.484180664 | 0.938614611 | 0.002175145 |
| 407 | 5720497 | 25777601 | NM_002808.3 | PSMD2 | 31.15011938 | 1.146090486 | 0.002181127 |
| 408 | 630091 | 21536482 | NM_003518.3 | HIST1H2BG | −13.60500067 | 0.819384796 | 0.00218131 |
| 409 | 2850274 | 88952955 | XM_926366.1 | LOC653181 | −1.935228719 | 0.953381316 | 0.002182192 |
| 410 | 1710100 | 54860104 | NM_018054.4 | ARHGAP17 | 53.494328 | 1.203378443 | 0.002183767 |
| 411 | 6650482 | 27811314 | CB066794 | | 2.266652104 | 1.055934349 | 0.002184843 |
| 412 | 6040196 | 34335276 | NM_015568.2 | PPP1R16B | 28.57922477 | 1.214435517 | 0.002197064 |
| 413 | 2510132 | 34147385 | NM_024844.2 | NUP85 | 25.75983033 | 1.159776012 | 0.002199934 |
| 414 | 3460242 | 20127505 | NM_006556.2 | PMVK | 16.95917741 | 1.145346624 | 0.002201696 |
| 415 | 5870300 | 19592429 | BM974838 | | 3.55266692 | 1.080305117 | 0.00220268 |
| 416 | 1010754 | 34101267 | NM_020803.3 | KLHL8 | −26.74101975 | 0.788060862 | 0.002203432 |
| 417 | 4540088 | 16877451 | BC016972 | | −3.538684311 | 0.925430866 | 0.002221092 |
| 418 | 630768 | 13399321 | NM_024662.1 | NAT10 | 18.28438533 | 1.168615183 | 0.00222234 |
| 419 | 3840131 | 13376746 | NM_025152.1 | NUBPL | 6.311302866 | 1.116147303 | 0.002242144 |
| 420 | 5050390 | 58331183 | NM_006429.2 | CCT7 | 36.9437154 | 1.173816637 | 0.002248928 |
| 421 | 730543 | 54144651 | NM_001517.4 | GTF2H4 | 14.70939523 | 1.167778973 | 0.002249712 |
| 422 | 840139 | 24792039 | CA429313 | | 2.270203986 | 1.054352894 | 0.002252613 |
| 423 | 7380241 | 39812261 | NM_003530.3 | HIST1H3D | −21.86668228 | 0.793726621 | 0.00226776 |
| 424 | 3940338 | 12669910 | NM_005225.1 | E2F1 | −5.162386453 | 0.908474544 | 0.002305931 |
| 425 | 7650458 | 62422567 | NM_001313.3 | CRMP1 | 5.572953708 | 1.098993806 | 0.00231087 |
| 426 | 6110132 | 13376252 | NM_024839.1 | RPP21 | 59.80821658 | 1.179349782 | 0.002310908 |
| 427 | 3130291 | 27886542 | NM_004555.2 | NFATC3 | 15.6758675 | 1.14504507 | 0.002320651 |
| 428 | 7380347 | 55743082 | NM_001006940.1 | ALG3 | 23.9546724 | 1.169231331 | 0.002321091 |
| 429 | 6550762 | 27734876 | NM_173555.1 | TYSND1 | 36.94434887 | 1.185786991 | 0.002333003 |
| 430 | 1030041 | 40788014 | NM_021209.3 | CARD12 | −24.56951249 | 0.818818786 | 0.002358744 |
| 431 | 1820341 | 21396488 | NM_004793.2 | PRSS15 | 22.47364221 | 1.206078489 | 0.002396097 |
| 432 | 2370593 | 66348044 | NM_016478.3 | ZC3HC1 | 19.91283504 | 1.166411255 | 0.002399701 |
| 433 | 6650403 | 7706336 | NM_016057.1 | COPZ1 | 40.88815665 | 1.163358795 | 0.002410936 |
| 434 | 3710228 | 62739164 | NM_182943.2 | PLOD2 | −6.41581762 | 0.875464193 | 0.002417035 |
| 435 | 1090139 | 24475981 | NM_016464.2 | HSPC196 | 22.43444477 | 1.189752629 | 0.002427259 |
| 436 | 2070494 | 24234749 | NM_012218.2 | ILF3 | 66.65536913 | 1.264598066 | 0.00246216 |
| 437 | 6480458 | 71773200 | NM_001030018.1 | APRT | 49.22444358 | 1.266012441 | 0.002496455 |
| 438 | 830754 | 11277467 | NM_006427.2 | SIVA | 15.28911626 | 1.123182292 | 0.002511787 |
| 439 | 5090554 | 38016938 | NM_002150.2 | HPD | −6.000610516 | 0.892380431 | 0.002530391 |
| 440 | 5090047 | 28416952 | NM_032501.2 | ACSS1 | 35.01148376 | 1.184237465 | 0.002539779 |
| 441 | 4880681 | 21361381 | NM_007171.2 | POMT1 | 12.61365289 | 1.174440001 | 0.002541681 |
| 442 | 7200477 | 6640026 | AW263210 | | −1.678426858 | 0.960397391 | 0.002564708 |
| 443 | 2750035 | 65508349 | NM_001018062.1 | LOC51149 | 2.484711498 | 1.062668028 | 0.002577857 |
| 444 | 3290019 | 54607143 | NM_152735.3 | ZBTB9 | 14.11460038 | 1.157880814 | 0.002589178 |
| 445 | 3850020 | 10437827 | AK025332 | | −26.25812165 | 0.759114727 | 0.002632909 |
| 446 | 5670274 | 22035641 | NM_030644.1 | APOL3 | 28.59518167 | 1.194613178 | 0.002633129 |
| 447 | 2760064 | 24234721 | NM_006260.2 | DNAJC3 | −6.571723401 | 0.884214748 | 0.002633237 |
| 448 | 5570661 | 34147500 | NM_020315.3 | PDXP | 25.74017676 | 1.220220548 | 0.002654539 |
| 449 | 5090315 | 51094102 | NM_019082.2 | DDX56 | 52.28321626 | 1.235529494 | 0.002654824 |
| 450 | 3140088 | 45387930 | NM_205548.1 | UNQ9217 | −3.394067971 | 0.932686171 | 0.002657711 |
| 451 | 4010048 | 34304338 | NM_004035.4 | ACOX1 | −43.72066716 | 0.802689627 | 0.002662627 |
| 452 | 7380736 | 40317621 | NM_199176.1 | MRRF | 4.945702746 | 1.084721323 | 0.002666503 |
| 453 | 1170139 | 52421789 | NM_033141.2 | MAP3K9 | 3.726192295 | 1.066369155 | 0.002667438 |
| 454 | 5260184 | 32217345 | CD693563 | | 10.93731216 | 1.194775359 | 0.002672296 |
| 455 | 7320594 | 55956901 | NM_006724.2 | MAP3K4 | 21.59370431 | 1.158641495 | 0.002720574 |
| 456 | 4900398 | 89060532 | XM_946033.1 | LOC652809 | −3.418618822 | 0.935923831 | 0.002738753 |
| 457 | 2850288 | 31077212 | NM_001530.2 | HIF1A | −17.7068821 | 0.797710279 | 0.002742525 |
| 458 | 6660471 | 25306269 | NM_016050.2 | MRPL11 | 28.56600561 | 1.177667177 | 0.002745508 |
| 459 | 1710189 | 5453751 | NM_006424.1 | SLC34A2 | 2.229363981 | 1.050166934 | 0.002749561 |
| 460 | 6620674 | 34147574 | NM_006410.3 | HTATIP2 | −17.29978654 | 0.88693604 | 0.002756336 |
| 461 | 5890494 | 47834345 | NM_012257.3 | HBP1 | −50.56848683 | 0.83510744 | 0.002765307 |
| 462 | 7160767 | 89042800 | XM_945544.1 | UBE2Z | 55.13945078 | 1.130117008 | 0.002775733 |
| 463 | 1510224 | 53729323 | NM_017838.3 | NOLA2 | 35.91106831 | 1.179080572 | 0.002802852 |
| 464 | 380541 | 27436919 | NM_003971.3 | SPAG9 | −16.78481129 | 0.871575447 | 0.00282301 |
| 465 | 1450523 | 89035472 | XM_930820.1 | LRRK2 | −68.96090215 | 0.719755782 | 0.002825347 |
| 466 | 6520241 | 23510351 | NM_020679.2 | MIF4GD | 27.40320804 | 1.159950156 | 0.002830456 |
| 467 | 60468 | 17017983 | NM_001261.2 | CDK9 | 24.99861391 | 1.168629649 | 0.00283774 |
| 468 | 6110228 | 50355989 | NM_173855.3 | MORN3 | 3.709222234 | 1.08270705 | 0.002842034 |
| 469 | 580050 | 31543835 | NM_016616.2 | TXNDC3 | −27.04827067 | 0.793501561 | 0.00284596 |
| 470 | 3780243 | 55953128 | NM_001550.2 | IFRD1 | −50.9467186 | 0.757230602 | 0.002863928 |
| 471 | 5090647 | 2816926 | AA765688 | | −2.251315518 | 0.946398658 | 0.002880931 |
| 472 | 5340162 | 56550038 | NM_005933.2 | MLL | 23.28905135 | 1.270793653 | 0.00290127 |
| 473 | 7560603 | 21071035 | NM_020926.2 | BCOR | 3.835536594 | 1.073378361 | 0.002913866 |
| 474 | 5820465 | 21361852 | NM_020405.3 | PLXDC1 | 10.07727623 | 1.144744368 | 0.002918091 |
| 475 | 7000224 | 20336295 | NM_018380.2 | DDX28 | 12.70400328 | 1.117735353 | 0.002939555 |
| 476 | 3420682 | 9257200 | NM_015722.2 | DRD1IP | 3.175697509 | 1.074847011 | 0.002940764 |
| 477 | 1470541 | 24532964 | CA314866 | | −2.368897154 | 0.945452428 | 0.002942185 |
| 478 | 940450 | 61966858 | NM_001013706.1 | LOC440503 | −6.987092813 | 0.869107661 | 0.002951728 |
| 479 | 6270215 | 89041715 | XM_373742.4 | MGC40489 | 3.326299967 | 1.07180415 | 0.002959387 |
| 480 | 5050653 | 24432071 | NM_145032.2 | FBXL13 | −18.83916692 | 0.810627797 | 0.002971531 |
| 481 | 1070189 | 5729975 | NM_006608.1 | PHTF1 | −24.33989005 | 0.794747722 | 0.002986487 |
| 482 | 650767 | 30795205 | NM_006243.2 | PPP2R5A | −67.1556536 | 0.847031344 | 0.002994704 |
| 483 | 6280168 | 21450799 | NM_145043.1 | NEIL2 | 19.88048242 | 1.19544672 | 0.002995077 |
| 484 | 2640278 | 22027508 | NM_017955.2 | CDCA4 | 6.698447811 | 1.111031409 | 0.002997021 |

TABLE 3
Svm algorithm

```
perform.Ttest <- function(data.set,classes,class.1,class.2)
{
  data1 <- data.set[,which(classes == class.1)]
  data2 <- data.set[,which(classes == class.2)]
  matrixForTTest <- cbind(data1,data2)
  num.data1 <- dim(data1)[2]
  num.Total <- dim(matrixForTTest)[2]
  Ttest_p_value <- apply( matrixForTTest ,
```

1 ,
function(x , nData1, nTotal) {

t.test( x[1:nData1], x[nData1+1:nTotal]

)$p.value

} ,

nData1 = num.data1 ,
nTotal = num.Total )

return(Ttest_p_value)
}
######################## MAINPROGRAMM
#########################################
### Daten laden ###
load(src.file.data.train)

| | |
|---|---|
| pc | <- raw.Data |
| classes.pc | <- sampleSheet[,3] |

```
### LOO CV ###
pvals.pc1 <- perform.Ttest(pc[,-1],classes.pc[-1],class.1,class.2)
pvals.pc2 <- perform.Ttest(pc[,-2],classes.pc[-2],class.1,class.2)
pvals.pc3 <- perform.Ttest(pc[,-3],classes.pc[-3],class.1,class.2)
pvals.pc4 <- perform.Ttest(pc[,-4],classes.pc[-4],class.1,class.2)
pvals.pc5 <- perform.Ttest(pc[,-5],classes.pc[-5],class.1,class.2)
pvals.pc6 <- perform.Ttest(pc[,-6],classes.pc[-6],class.1,class.2)
pvals.pc7 <- perform.Ttest(pc[,-7],classes.pc[-7],class.1,class.2)
pvals.pc8 <- perform.Ttest(pc[,-8],classes.pc[-8],class.1,class.2)
pvals.pc9 <- perform.Ttest(pc[,-9],classes.pc[-9],class.1,class.2)
pvals.pc10 <- perform.Ttest(pc[,-10],classes.pc[-10],class.1,class.2)
pvals.pc11 <- perform.Ttest(pc[,-11],classes.pc[-11],class.1,class.2)
pvals.pc12 <- perform.Ttest(pc[,-12],classes.pc[-12],class.1,class.2)
pvals.pc13 <- perform.Ttest(pc[,-13],classes.pc[-13],class.1,class.2)
pvals.pc14 <- perform.Ttest(pc[,-14],classes.pc[-14],class.1,class.2)
pvals.pc15 <- perform.Ttest(pc[,-15],classes.pc[-15],class.1,class.2)
pvals.pc16 <- perform.Ttest(pc[,-16],classes.pc[-16],class.1,class.2)
pvals.pc17 <- perform.Ttest(pc[,-17],classes.pc[-17],class.1,class.2)
pvals.pc18 <- perform.Ttest(pc[,-18],classes.pc[-18],class.1,class.2)
pvals.pc19 <- perform.Ttest(pc[,-19],classes.pc[-19],class.1,class.2)
pvals.pc20 <- perform.Ttest(pc[,-20],classes.pc[-20],class.1,class.2)
pvals.pc21 <- perform.Ttest(pc[,-21],classes.pc[-21],class.1,class.2)
pvals.pc22 <- perform.Ttest(pc[,-22],classes.pc[-22],class.1,class.2)
pvals.pc23 <- perform.Ttest(pc[,-23],classes.pc[-23],class.1,class.2)
pvals.pc24 <- perform.Ttest(pc[,-24],classes.pc[-24],class.1,class.2)
pvals.pc25 <- perform.Ttest(pc[,-25],classes.pc[-25],class.1,class.2)
pvals.pc26 <- perform.Ttest(pc[,-26],classes.pc[-26],class.1,class.2)
pvals.pc27 <- perform.Ttest(pc[,-27],classes.pc[-27],class.1,class.2)
pvals.pc28 <- perform.Ttest(pc[,-28],classes.pc[-28],class.1,class.2)
pvals.pc29 <- perform.Ttest(pc[,-29],classes.pc[-29],class.1,class.2)
pvals.pc30 <- perform.Ttest(pc[,-30],classes.pc[-30],class.1,class.2)
pvals.pc31 <- perform.Ttest(pc[,-31],classes.pc[-31],class.1,class.2)
pvals.pc32 <- perform.Ttest(pc[,-32],classes.pc[-32],class.1,class.2)
pvals.pc33 <- perform.Ttest(pc[,-33],classes.pc[-33],class.1,class.2)
pvals.pc34 <- perform.Ttest(pc[,-34],classes.pc[-34],class.1,class.2)
pvals.pc35 <- perform.Ttest(pc[,-35],classes.pc[-35],class.1,class.2)
pvals.pc36 <- perform.Ttest(pc[,-36],classes.pc[-36],class.1,class.2)
pvals.pc37 <- perform.Ttest(pc[,-37],classes.pc[-37],class.1,class.2)
pvals.pc38 <- perform.Ttest(pc[,-38],classes.pc[-38],class.1,class.2)
pvals.pc39 <- perform.Ttest(pc[,-39],classes.pc[-39],class.1,class.2)
pvals.pc40 <- perform.Ttest(pc[,-40],classes.pc[-40],class.1,class.2)
pvals.pc41 <- perform.Ttest(pc[,-41],classes.pc[-41],class.1,class.2)
pvals.pc42 <- perform.Ttest(pc[,-42],classes.pc[-42],class.1,class.2)
pvals.pc43 <- perform.Ttest(pc[,-43],classes.pc[-43],class.1,class.2)
pvals.pc44 <- perform.Ttest(pc[,-44],classes.pc[-44],class.1,class.2)
pvals.pc45 <- perform.Ttest(pc[,-45],classes.pc[-45],class.1,class.2)
pvals.pc46 <- perform.Ttest(pc[,-46],classes.pc[-46],class.1,class.2)
pvals.pc47 <- perform.Ttest(pc[,-47],classes.pc[-47],class.1,class.2)
pvals.pc48 <- perform.Ttest(pc[,-48],classes.pc[-48],class.1,class.2)
pvals.pc49 <- perform.Ttest(pc[,-49],classes.pc[-49],class.1,class.2)
pvals.pc50 <- perform.Ttest(pc[,-50],classes.pc[-50],class.1,class.2)
pvals.pc51 <- perform.Ttest(pc[,-51],classes.pc[-51],class.1,class.2)
pvals.pc52 <- perform.Ttest(pc[,-52],classes.pc[-52],class.1,class.2)
pvals.pc53 <- perform.Ttest(pc[,-53],classes.pc[-53],class.1,class.2)
pvals.pc54 <- perform.Ttest(pc[,-54],classes.pc[-54],class.1,class.2)
pvals.pc55 <- perform.Ttest(pc[,-55],classes.pc[-55],class.1,class.2)
pvals.pc56 <- perform.Ttest(pc[,-56],classes.pc[-56],class.1,class.2)
pvals.pc57 <- perform.Ttest(pc[,-57],classes.pc[-57],class.1,class.2)
pvals.pc58 <- perform.Ttest(pc[,-58],classes.pc[-58],class.1,class.2)
pvals.pc59 <- perform.Ttest(pc[,-59],classes.pc[-59],class.1,class.2)
pvals.pc60 <- perform.Ttest(pc[,-60],classes.pc[-60],class.1,class.2)
pvals.pc61 <- perform.Ttest(pc[,-61],classes.pc[-61],class.1,class.2)
pvals.pc62 <- perform.Ttest(pc[,-62],classes.pc[-62],class.1,class.2)
pvals.pc63 <- perform.Ttest(pc[,-63],classes.pc[-63],class.1,class.2)
pvals.pc64 <- perform.Ttest(pc[,-64],classes.pc[-64],class.1,class.2)
pvals.pc65 <- perform.Ttest(pc[,-65],classes.pc[-65],class.1,class.2)
pvals.pc66 <- perform.Ttest(pc[,-66],classes.pc[-66],class.1,class.2)
pvals.pc67 <- perform.Ttest(pc[,-67],classes.pc[-67],class.1,class.2)
pvals.pc68 <- perform.Ttest(pc[,-68],classes.pc[-68],class.1,class.2)
pvals.pc69 <- perform.Ttest(pc[,-69],classes.pc[-69],class.1,class.2)
pvals.pc70 <- perform.Ttest(pc[,-70],classes.pc[-70],class.1,class.2)
pvals.pc71 <- perform.Ttest(pc[,-71],classes.pc[-71],class.1,class.2)
pvals.pc72 <- perform.Ttest(pc[,-72],classes.pc[-72],class.1,class.2)
pvals.pc73 <- perform.Ttest(pc[,-73],classes.pc[-73],class.1,class.2)
pvals.pc74 <- perform.Ttest(pc[,-74],classes.pc[-74],class.1,class.2)
pvals.pc75 <- perform.Ttest(pc[,-75],classes.pc[-75],class.1,class.2)
pvals.pc76 <- perform.Ttest(pc[,-76],classes.pc[-76],class.1,class.2)
pvals.pc77 <- perform.Ttest(pc[,-77],classes.pc[-77],class.1,class.2)
pvals.all <- perform.Ttest(pc,classes.pc,class.1,class.2)
save( pvals.pc1, pvals.pc2, pvals.pc3, pvals.pc4, pvals.pc5, pvals.pc6,
pvals.pc7, pvals.pc8, pvals.pc9, pvals.pc10,
    pvals.pc11, pvals.pc12, pvals.pc13, pvals.pc14, pvals.pc15, pvals.pc16,
pvals.pc17, pvals.pc18, pvals.pc19, pvals.pc20,
    pvals.pc21, pvals.pc22, pvals.pc23, pvals.pc24, pvals.pc25, pvals.pc26,
pvals.pc27, pvals.pc28, pvals.pc29, pvals.pc30,
    pvals.pc31, pvals.pc32, pvals.pc33, pvals.pc34, pvals.pc35, pvals.pc36,
pvals.pc37, pvals.pc38, pvals.pc39, pvals.pc40,
    pvals.pc41, pvals.pc42, pvals.pc43, pvals.pc44, pvals.pc45, pvals.pc46,
pvals.pc47, pvals.pc48, pvals.pc49, pvals.pc50,
    pvals.pc51, pvals.pc52, pvals.pc53, pvals.pc54, pvals.pc55, pvals.pc56,
pvals.pc57, pvals.pc58, pvals.pc59, pvals.pc60,
    pvals.pc61, pvals.pc62, pvals.pc63, pvals.pc64, pvals.pc65, pvals.pc66,
pvals.pc67, pvals.pc68, pvals.pc69, pvals.pc70,
    pvals.pc71, pvals.pc72, pvals.pc73, pvals.pc74, pvals.pc75, pvals.pc76,
pvals.pc77,
    pc , classes.pc, file=out.file.tmp)
#########################################
### SVM ###
load(file=out.file.tmp)
pvals.choose <-
c(seq(0.00009,0.00009,0.00001),seq(0.0001,0.0009,0.0001),seq(0.001,0.009,0.001
))
```

| aucs <- data.frame( | row.names=seq(1,length(pvals.choose),1) , |
|---|---|
| | “SVM.AUC”=rep(NA,length(pvals.choose)) , |
| | “PAM.AUC”=rep(NA,length(pvals.choose)) , |
| | “LDA.AUC”=rep(NA,length(pvals.choose)) ) |

```
sensitivity <- c(rep(0,length(pvals.choose)))
specifity <- c(rep(0,length(pvals.choose)))
k <- 1
for(j in pvals.choose){
  svm.predictions <- data.frame(“NonBC”=rep(0,77), “BC”=rep(0,77))
  svm.predictions.classes <- NULL
  pam.predictions <- data.frame(“NonBC”=rep(0,77), “BC”=rep(0,77))
  pam.predictions.classes <- NULL
  lda.predictions <- data.frame(“NonBC”=rep(0,77), “BC”=rep(0,77))
  lda.predictions.classes <- NULL
  for(i in 1:77){
```

p <- eval(parse(text=paste(“pvals.pc”,i,sep=“”)))
sig.all <- which(p<j)
train <- pc[sig.all,−i]
classes.train <- classes.pc[−i]
test <- pc[sig.all,i]
classes.test <- classes.pc[i]
#SVM
require(e1071)
SVM =svm(t(as.matrix(train)), as.factor(classes.train),

kernel=“linear”,probability = T)

svm.pred <- predict(SVM,t(test),probability=T)
result <- table(pred = svm.pred, true = classes.test)
if(classes.test==“BC”) { sensitivity[k] <-

sensitivity[k]+result[1,1]}

if(classes.test==“NonBC”) { specifity[k] <- specifity[k]+result[2,2]}
pred <- attr(svm.pred,“probabilities”)
svm.predictions[i,] <- pred
row.names(svm.predictions)[i] <- names(pc)[i]
svm.predictions.classes <- c(svm.predictions.classes , classes.test)
#PAM
require(pamr)
train.dat <- list(x = as.matrix(train), y = as.factor(classes.train))
model <- pamr.train(train.dat)
pam.predictions[i,] <- pamr.predict(model, as.matrix(test),

0,type=“posterior”)

row.names(pam.predictions)[i] <- names(pc)[i]
pam.predictions.classes <- c(pam.predictions.classes , classes.test)
#LDA
require(MASS)
train.lda <- lda(t(as.matrix(train)), as.factor(classes.train))
lda.predictions[i,] <- predict(train.lda, t(test))$posterior
row.names(lda.predictions)[i] <- names(pc)[i]
lda.predictions.classes <- c(lda.predictions.classes , classes.test)

```
  }
  require(ROCR)
  pred.dist <- svm.predictions[,which(colnames(svm.predictions)==“BC”)]
  pred.rocr <- prediction(pred.dist,as.factor(svm.predictions.classes))
  perf.rocr <- performance(pred.rocr,measure=“auc”)
  aucs$“SVM.AUC”[k] <- as.numeric(perf.rocr@y.values)
  require(ROCR)
  pred.dist <- pam.predictions[,which(colnames(pam.predictions)==“BC”)]
  pred.rocr <- prediction(pred.dist,as.factor(pam.predictions.classes))
  perf.rocr <- performance(pred.rocr,measure=“auc”)
  aucs$“PAM.AUC”[k] <- as.numeric(perf.rocr@y.values)
  require(ROCR)
  pred.dist <- lda.predictions[,which(colnames(lda.predictions)==“BC”)]
  pred.rocr <- prediction(pred.dist,as.factor(lda.predictions.classes))
  perf.rocr <- performance(pred.rocr,measure=“auc”)
  aucs$“LDA.AUC”[k] <- as.numeric(perf.rocr@y.values)
  row.names(aucs)[k] <- j
  k<-k+1
}
jpeg(filename=out.file.auc)
plot(as.matrix(aucs$“SVM.AUC”), ylim=(0:1), main=“Auc LOOCV T-Test”,
xlab=“cut-offs F-statistic”, ylab=“AUC”,xaxt=“n”,type=“l” ,col=“red”)
lines(as.matrix(aucs$“PAM.AUC”), col=“green”)
lines(as.matrix(aucs$“LDA.AUC”), col=“blue”)
lines( c(0,length(pvals.choose)) , c(0.5,0.5) )
legend( “topleft” , c(“SVM”,“PAM”,“LDA”), cex=0.8,
col=c(“red”,“green”,“blue”), lty=1)
axis(1, at=1:length(pvals.choose) ,lab=rep(“”,length(pvals.choose)) )
axis(1, at=seq(1,length(pvals.choose),3) ,
lab=pvals.choose[seq(1,length(pvals.choose),3)] ,lwd.ticks=2)
dev.off( )
# Cutoff anwenden
load(file=out.file.tmp)
data.sig.all <- as.data.frame(which(pvals.all<=0.003) )
pc.new <- merge(pc,data.sig.all[−1], by.x=“row.names”, by.y=“row.names”)
row.names(pc.new) <- pc.new$Row.names
pc.new$Row.names <- NULL
load(src.file.data.test)
pc.l.new <- merge(raw.Data,data.sig.all[−1], by.x=“row.names”,
by.y=“row.names”)
row.names(pc.1.new) <- pc.1.new$Row.names
pc.1.new$Row.names <- NULL
classes.pc1 <- sampleSheet[,3]
rm(raw.Data, sampleSheet)
### ROC-Kurve ###
require(e1071)
SVM = svm(t(as.matrix(pc.new)), as.factor(classes.pc), kernel=“linear”,
cross=10, probability = TRUE)
svm.pred <- predict(SVM,t(pc.1.new),probability=T)
table(pred = svm.pred, true = classes.pc1)
fisher.test(table(pred = svm.pred, true = classes.pc1))
pred <- attr(svm.pred,“probabilities”)
require(ROCR)
pred.dist <- pred[,which(colnames(pred)==class.1)]
pred.rocr <- prediction(pred.dist,as.factor(classes.pc1))
perf.rocr <- performance(pred.rocr,measure=“auc”)
as.numeric(perf.rocr@y.values)
perf.rocr <- performance(pred.rocr,“tpr”,“fpr”)
jpeg(file=out.file.roc)
plot(perf.rocr, main=paste(“ROC - AUC: ”,
format(unlist(performance(pred.rocr,measure=“auc”)@y.values),digits=4),“
Cutoff: 0.003”, sep=“” ) )
lines( x=c(0,1) , y=c(0,1) , type=“l”, col=“red”)
dev.off( )
# YoudenIndex optimierung
roc <- performance(pred.rocr,“tpr”,“fpr”)
abc <- data.frame(“Sens” = attr(roc,“y.values”) , “Spez” =
attr(roc,“x.values”), “YoudenIndex”=0)
names(abc) <- c(“Sens”,“Spez”,“YoudenIndex”)
abc$Spez <- 1−abc$Spez
abc$YoudenIndex <- abc$Sens + abc$Spez−1
index <- match(max(abc$YoudenIndex),abc$YoudenIndex)
points( x=(1−abc$Spez[index]) , y=(abc$Sens[index]) , col=“green”, pch=19,
cex=1.5)
dev.off( )
```

Lists
9.00E−05

| List 1 | | | List 2 | | | List 3 | | |
|---|---|---|---|---|---|---|---|---|
| AUC | | 0.87 | | | 1.00 | | | 1.00 |
| Number of | | 5 | | | 6 | | | 5 |
| Transcripts | | | | | | | | |
| Acc.-No. | Probe ID | p-Value | Acc.-No. | Probe ID | p-Value | Acc.-No. | Probe ID | p-Value |
| NM_007115 | 2370524 | 3.72E−06 | NM_000155 | V520332 | 2.35E−05 | NM_000896 | 650164 | 4.19E−05 |
| NM_014941 | 3360364 | 4.61E−05 | NM_007115 | 2370524 | 5.38E−06 | AF272739 | 1050128 | 8.83E−05 |
| NM_016553 | 4760543 | 2.55E−05 | NM_025153 | 2630484 | 4.79E−05 | NM_007115 | 2370524 | 2.66E−05 |
| NM_014281 | 4900053 | 1.89E−05 | NM_031488 | 3120301 | 7.69E−05 | NM_025153 | 2630484 | 5.73E−06 |
| NM_000074 | 6270128 | 8.15E−05 | NM_016553 | 4760543 | 4.28E−05 | NM_003543 | 4730195 | 7.59E−05 |
| | | | NM_013270 | 5690037 | 5.68E−05 | | | |
| List 4 | | | List 5 | | | List 6 | | |
| AUC | | 0.867 | | | 1.00 | | | 0.9167 |
| Number of | | 6 | | | 7 | | | 7 |
| Transcripts | | | | | | | | |
| Acc.-No. | Probe ID | p-Value | Acc.-No. | Probe ID | p-Value | Acc.-No. | Probe ID | p-Value |
| NM_018715 | 510450 | 9.61E−05 | NM_000155 | 520332 | 2.35E−05 | NM_000896 | 650164 | 4.19E−05 |
| NM_007115 | 2370524 | 3.72E−06 | NM_007115 | 2370524 | 5.38E−06 | AF272739 | 1050128 | 8.83E−05 |
| NM_014941 | 3360364 | 4.61E−05 | NM_025153 | 2630484 | 4.79E−05 | NM_007115 | 2370524 | 2.66E−05 |
| NM_016553 | 4760543 | 2.55E−05 | NM_031488 | 3120301 | 7.69E−05 | T03068 | 2450497 | 9.16E−05 |
| NM_014281 | 4900053 | 1.89E−05 | NM_016553 | 4760543 | 4.28E−05 | NM_025153 | 2630484 | 5.73E−06 |
| NM_000074 | 6270128 | 8.15E−05 | NM_014281 | 4900053 | 9.51E−05 | XM_930898 | 3830390 | 9.69E−05 |
| | | | NM_013270 | 5690037 | 5.68E−05 | NM_003543 | 4730195 | 7.59E−05 |

| | |
|---|---|
| List 7 | List 8 |

| AUC | | 0.8 | | | 0.833 |
|---|---|---|---|---|---|
| Number of | | 37 | | | 25 |
| Transcripts | | | | | |
| Acc.-No. | Probe ID | p-Value | Acc.-No. | Probe ID | p-Value |
| NM_018715 | 510450 | 4.67E−05 | NM_018715 | 510450 | 1.30E−05 |
| NM_000155 | 520332 | 2.39E−05 | NM_000155 | 520332 | 6.03E−05 |
| NM_000896 | 650164 | 1.21E−05 | CR596519 | 670041 | 4.42E−05 |
| CR596519 | 670041 | 1.02E−05 | NM_004927 | 1030692 | 6.28E−05 |
| AF272739 | 1050128 | 6.73E−05 | NM_015292 | 1110215 | 4.92E−05 |
| NM_015292 | 1110215 | 1.94E−05 | NM_016408 | 1440601 | 4.37E−05 |
| NM_000578 | 1430292 | 3.80E−05 | NM_001099786 | 1820598 | 3.38E−05 |
| NM_018285 | 1780348 | 2.00E−05 | NM_007115 | 2370524 | 1.79E−05 |
| NM_001099786 | 1820598 | 4.24E−05 | T03068 | 2450497 | 5.57E−05 |
| NM_007115 | 2370524 | 7.19E−06 | NM_025153 | 2630484 | 9.60E−05 |
| NM_031412 | 2630154 | 8.06E−05 | NM_001014838 | 2690609 | 9.68E−05 |
| NM_003528 | 2630451 | 7.07E−05 | NM_006767 | 3140093 | 9.93E−05 |
| NM_025153 | 2630484 | 4.77E−05 | NM_014941 | 3360364 | 7.94E−05 |
| NM_001014838 | 2690609 | 7.10E−05 | NM_005476 | 3610504 | 5.91E−06 |
| NM_003059 | 2710397 | 4.94E−05 | X00437 | 3990639 | 7.90E−05 |
| NM_031488 | 3120301 | 4.99E−05 | NM_001042631 | 4220138 | 3.86E−05 |
| NM_014941 | 3360364 | 9.68E−05 | NM_016553 | 4760543 | 3.10E−05 |
| NM_139244 | 3460189 | 2.29E−05 | NM_014281 | 4900053 | 4.57E−05 |
| NM_003137 | 3460674 | 5.14E−05 | NM_178510 | 5910091 | 3.75E−05 |
| NM_213566 | 3520192 | 2.97E−05 | NM_005968 | 6270021 | 5.91E−05 |
| X00437 | 3990639 | 7.23E−05 | NM_000074 | 6270128 | 2.40E−05 |
| NM_020414 | 4280332 | 6.03E−05 | NM_024619 | 6590386 | 4.64E−05 |
| NM_003543 | 4730195 | 4.77E−05 | NM_018384 | 6960746 | 9.79E−05 |
| CK300859 | 4730577 | 3.41E−06 | NM_006901 | 7150634 | 6.17E−05 |
| NM_016553 | 4760543 | 3.19E−05 | NM_001152 | 7550537 | 3.79E−05 |
| NM_016552 | 4850541 | 8.90E−05 | | | |
| NM_014281 | 4900053 | 3.39E−05 | | | |
| NM_013270 | 5690037 | 5.55E−05 | | | |
| BU733214 | 5860196 | 3.30E−05 | | | |
| NM_005384 | 6100228 | 9.53E−05 | | | |
| NM_000074 | 6270128 | 2.47E−05 | | | |
| NM_033416 | 6380598 | 1.82E−05 | | | |
| NM_018384 | 6960746 | 5.30E−05 | | | |
| NM_004776 | 6980070 | 6.26E−05 | | | |
| NM_006901 | 7150634 | 5.85E−05 | | | |
| NM_003757 | 7320576 | 6.47E−05 | | | |
| NM_001152 | 7550537 | 1.15E−05 | | | |

| | |
|---|---|
| List 9 | List 10 |

| AUC | | 0.867 | | | 0.9167 |
|---|---|---|---|---|---|
| Number of | | 21 | | | 51 |
| Transcripts | | | | | |
| Acc.-No. | Probe ID | p-Value | Acc.-No. | Probe ID | p-Value |
| NM_018715 | 510450 | 9.61E−05 | NM_021872 | 460754 | 0.000157328 |
| NM_015039 | 1580348 | 0.000158009 | NM_000155 | 520332 | 6.47E−05 |
| BX101820 | 1690504 | 0.000106674 | NM_002129 | 610563 | 0.000110345 |
| NM_002405 | 1710286 | 0.000137385 | NM_000896 | 650164 | 0.000103802 |
| NM_017758 | 2100221 | 0.000121456 | CR596519 | 670041 | 0.000147265 |
| NM_014738 | 2190673 | 0.000184581 | NM_015292 | 1110215 | 8.41E−05 |
| XM_935843 | 2260446 | 0.000153083 | NM_015039 | 2190673 | 0.000174147 |
| NM_007115 | 2370524 | 3.72E−06 | NM_002405 | 7550537 | 9.18E−06 |
| NM_025153 | 2630484 | 0.000144774 | NM_018285 | 1780348 | 8.15E−05 |
| NM_031488 | 3120301 | 0.000157583 | NM_001099786 | 1820598 | 9.65E−05 |
| NM_014941 | 3360364 | 4.61E−05 | NM_001040138 | 2000551 | 6.52E−05 |
| NM_003137 | 3460674 | 0.000140303 | NM_014738 | 1580348 | 0.000162896 |
| CK300859 | 4730577 | 0.00010617 | XM_935843 | 3120301 | 0.000142293 |
| NM_016553 | 4760543 | 2.55E−05 | T03068 | 2450497 | 0.000138607 |
| NM_014281 | 4900053 | 1.89E−05 | NM_025153 | 2630484 | 0.000126567 |
| NM_000074 | 6270128 | 8.15E−05 | NM_005980 | 2640609 | 0.000165184 |
| NM_001040107 | 6400563 | 0.000184244 | NM_017917 | 2760110 | 0.000181821 |
| NM_024619 | 6590386 | 0.000143395 | NM_031488 | 6590386 | 6.95E−05 |
| NM_004776 | 6980070 | 0.000192696 | NM_033111 | 3140246 | 0.000174455 |
| NM_078483 | 7100136 | 0.000161958 | NM_014941 | 3460674 | 0.000102057 |
| NM_001152 | 7550537 | 0.00016679 | NM_005698 | 3370687 | 0.00019446 |
| | | | NM_213566 | 3520192 | 7.56E−05 |
| | | | X00437 | 3990639 | 0.000122793 |
| | | | NM_004811 | 4060131 | 0.00014067 |
| | | | NM_001779 | 4150161 | 0.000137216 |
| | | | NM_020414 | 4280332 | 1.23E−05 |
| | | | NM_003543 | 4730195 | 0.000118733 |
| | | | NM_005243 | 4780743 | 8.83E−05 |
| | | | NM_024092 | 4880364 | 6.99E−05 |
| | | | NM_001007239 | 5310754 | 0.000166279 |
| | | | NM_003906 | 5390131 | 6.40E−05 |
| | | | NM_001001998 | 5490142 | 5.97E−05 |
| | | | NM_013270 | 5690037 | 9.97E−05 |
| | | | NM_173791 | 5720398 | 0.000168409 |
| | | | BU733214 | 5860196 | 0.000116941 |
| | | | NM_006082 | 5900156 | 9.05E−05 |
| | | | NM_014230 | 6020402 | 2.36E−05 |
| | | | NM_004044 | 6110768 | 3.35E−05 |
| | | | NM_005968 | 6270021 | 0.000159063 |
| | | | NM_000074 | 510450 | 3.90E−06 |
| | | | NM_001040107 | 6270128 | 3.02E−05 |
| | | | NM_033554 | 6480500 | 0.000149827 |
| | | | NM_024619 | 3360364 | 8.60E−05 |
| | | | NM_001007224 | 6590523 | 0.000167323 |
| | | | NM_018384 | 6960746 | 0.000124128 |
| | | | NM_004776 | 4760543 | 1.67E−05 |
| | | | NM_078483 | 4900053 | 5.14E−05 |
| | | | NM_006901 | 7150634 | 2.12E−05 |
| | | | NM_014976 | 7160296 | 6.53E−05 |
| | | | NM_016237 | 7380288 | 6.12E−05 |
| | | | NM_001152 | 2370524 | 6.45E−07 |

| | |
|---|---|
| List 11 | List 12 |

| AUC | | 0.9167 | | | 0.9167 |
|---|---|---|---|---|---|
| Number of | | 44 | | | 11 |
| Transcripts | | | | | |
| Acc.-No. | Probe ID | p-Value | Acc.-No. | Probe ID | p-Value |
| NM_018715 | 510450 | 5.75E−05 | NM_018715 | 510450 | 0.000153 |
| NM_023003 | 10541 | 0.000152211 | NM_000896 | 650164 | 4.19E−05 |
| NM_206967 | 20224 | 0.000148094 | AF272739 | 1050128 | 8.83E−05 |
| NM_015062 | 20647 | 0.000190585 | NM_007115 | 2370524 | 2.66E−05 |
| NM_016292 | 160736 | 9.71E−05 | T03068 | 2450497 | 9.16E−05 |
| NM_002348 | 450037 | 0.000158029 | NM_003528 | 2630451 | 0.000164 |
| NM_000155 | 520332 | 2.00E−05 | NM_025153 | 2630484 | 5.73E−06 |
| NM_000896 | 650164 | 2.29E−05 | XM_930898 | 3830390 | 9.69E−05 |
| CR596519 | 670041 | 5.24E−05 | NM_003543 | 4730195 | 7.59E−05 |
| NM_015292 | 1110215 | 5.97E−05 | NM_000074 | 6270128 | 0.000132 |
| NM_015039 | 2190673 | 0.000148025 | NM_001152 | 7550537 | 0.000158 |
| NM_002405 | 7550537 | 9.37E−05 | | | |
| NM_018285 | 1780348 | 0.000157742 | | | |
| NM_001099786 | 1820598 | 5.51E−05 | | | |
| XM_935843 | 3120301 | 0.00010759 | | | |
| T03068 | 2450497 | 6.26E−05 | | | |
| NM_025153 | 2630484 | 3.78E−05 | | | |
| NM_005980 | 2640609 | 0.000121141 | | | |
| NM_003707 | 2750408 | 0.000173267 | | | |
| NM_031488 | 6590386 | 5.24E−05 | | | |
| NM_014941 | 3460674 | 4.63E−05 | | | |
| NM_139244 | 3460189 | 0.000136298 | | | |
| NM_003707 | 3520082 | 5.68E−05 | | | |
| NM_213566 | 3520192 | 0.000197506 | | | |
| XM_930898 | 3830390 | 0.000190429 | | | |
| NM_005225 | 3940338 | 0.000175382 | | | |
| XM_940524 | 3940368 | 0.00018048 | | | |
| X00437 | 3990639 | 7.12E−05 | | | |
| NM_001042631 | 4220138 | 0.000174952 | | | |
| NM_020414 | 4280332 | 4.19E−05 | | | |
| NM_003543 | 4730195 | 8.13E−05 | | | |
| NM_007047 | 4920577 | 0.000118817 | | | |
| NM_032312 | 5290289 | 0.000171985 | | | |
| NM_013270 | 5690037 | 1.52E−05 | | | |
| NM_004044 | 6110768 | 4.01E−05 | | | |
| NM_000074 | 510450 | 5.75E−05 | | | |
| NM_001040107 | 6270128 | 0.000192081 | | | |
| NM_024619 | 3360364 | 4.62E−05 | | | |
| NM_018384 | 6960746 | 5.22E−05 | | | |
| NM_004776 | 4760543 | 9.71E−05 | | | |
| NM_182476 | 7050543 | 0.000184808 | | | |
| NM_078483 | 4900053 | 6.86E−05 | | | |
| NM_006901 | 7150634 | 0.000149288 | | | |
| NM_001152 | 2370524 | 3.63E−06 | | | |

| List 13 | | | List 14 | | | List 15 | | |
|---|---|---|---|---|---|---|---|---|
| AUC | | 0.93 | | | 0.83 | | | 0.9167 |
| Number of | | 34 | | | 39 | | | 16 |
| Transcripts | | | | | | | | |
| Acc.-No. | Probe ID | p-Value | Acc.-No. | Probe ID | p-Value | Acc.-No. | Probe ID | p-Value |
| NM_182898 | 160132 | 0.000251 | NM_015062 | 20647 | 0.00029 | NM_018715 | 510450 | 0.000153 |
| NM_018715 | 510450 | 9.61E−05 | NM_018715 | 510450 | 0.000131 | NM_000896 | 650164 | 4.19E−05 |
| NM_000155 | 520332 | 0.000228 | NM_000155 | 520332 | 2.35E−05 | XR_015582 | 770452 | 0.000289 |
| NM_000896 | 650164 | 0.000219 | NM_000896 | 650164 | 0.00015 | AF272739 | 1050128 | 8.83E−05 |
| NM_000887 | 1240603 | 0.000255 | CR596519 | 670041 | 0.000147 | NM_007115 | 2370524 | 2.66E−05 |
| NM_015039 | 1580348 | 0.000158 | AF272739 | 1050128 | 0.000152 | T03068 | 2450497 | 9.16E−05 |
| BX101820 | 1690504 | 0.000107 | NM_015292 | 1110215 | 0.00015 | NM_003528 | 2630451 | 0.000164 |
| NM_002405 | 1710286 | 0.000137 | NM_000878 | 1170307 | 0.000104 | NM_025153 | 2630484 | 5.73E−06 |
| NM_018285 | 1780348 | 0.000257 | NM_000887 | 1240603 | 0.000197 | NM_014941 | 3360364 | 0.000257 |
| NM_017758 | 2100221 | 0.000121 | NM_015039 | 1580348 | 0.000112 | XM_930898 | 3830390 | 9.69E−05 |
| NM_014738 | 2190673 | 0.000185 | NM_198196 | 2100333 | 0.000214 | NM_003543 | 4730195 | 7.59E−05 |
| XM_935843 | 2260446 | 0.000153 | NM_014738 | 2190673 | 0.000171 | NM_016553 | 4760543 | 0.000244 |
| NM_007115 | 2370524 | 3.72E−06 | XM_935843 | 2260446 | 0.000147 | NM_000074 | 6270128 | 0.000132 |
| NM_025153 | 2630484 | 0.000145 | NM_007115 | 2370524 | 5.38E−06 | NM_033416 | 6380598 | 0.000237 |
| NM_031488 | 3120301 | 0.000158 | T03068 | 2450497 | 0.000187 | NM_006901 | 7150634 | 0.000284 |
| NM_014941 | 3360364 | 4.61E−05 | NM_025153 | 2630484 | 4.79E−05 | NM_001152 | 7550537 | 0.000158 |
| NM_003137 | 3460674 | 0.00014 | NM_031488 | 3120301 | 7.69E−05 | | | |
| NM_005476 | 3610504 | 0.000258 | NM_014941 | 3360364 | 0.000147 | | | |
| AA868051 | 4150402 | 0.000262 | NM_015288 | 3420735 | 0.000198 | | | |
| AI863525 | 4230520 | 0.000274 | NM_003137 | 3460674 | 0.000151 | | | |
| CK300859 | 4730577 | 0.000106 | NM_213566 | 3520192 | 0.000105 | | | |
| NM_016553 | 4760543 | 2.55E−05 | XM_930898 | 3830390 | 0.000161 | | | |
| NM_016552 | 4850541 | 0.000257 | X00437 | 3990639 | 0.000235 | | | |
| NM_014281 | 4900053 | 1.89E−05 | AA868051 | 4150402 | 0.000207 | | | |
| NM_013270 | 5690037 | 0.000251 | NM_024600 | 4210647 | 0.000148 | | | |
| NM_006082 | 5900156 | 0.000222 | NM_020414 | 4280332 | 0.000117 | | | |
| NM_170699 | 5960035 | 0.000233 | NM_003543 | 4730195 | 0.000236 | | | |
| NM_000074 | 6270128 | 8.15E−05 | NM_016553 | 4760543 | 4.28E−05 | | | |
| NM_001040107 | 6400563 | 0.000184 | NM_016552 | 4850541 | 0.000256 | | | |
| NM_024619 | 6590386 | 0.000143 | NM_014281 | 4900053 | 9.51E−05 | | | |
| NM_004776 | 6980070 | 0.000193 | NM_032312 | 5290289 | 0.000232 | | | |
| NM_178839 | 6980609 | 0.000248 | NM_013270 | 5690037 | 5.68E−05 | | | |
| NM_078483 | 7100136 | 0.000162 | NM_004044 | 6110768 | 0.000153 | | | |
| NM_001152 | 7550537 | 0.000167 | NM_000074 | 6270128 | 0.000174 | | | |
| | | | NM_033554 | 6480500 | 0.000209 | | | |
| | | | NM_024619 | 6590386 | 0.000208 | | | |
| | | | NM_018384 | 6960746 | 0.000158 | | | |
| | | | NM_182476 | 7050543 | 0.000265 | | | |
| | | | NM_001152 | 7550537 | 0.000125 | | | |
| | | | | | 9.00E−05 | | | |

| | |
|---|---|
| List 16 | List 17 |

| AUC | | 0.8 | | | 0.81 |
|---|---|---|---|---|---|
| Number of | | 114 | | | 84 |
| Transcritps | | | | | |
| Acc.-No. | Probe ID | p-Value | Acc.-No. | Probe ID | p-Value |
| NM_001031717 | 10338 | 0.00014759 | NM_005621 | 10279 | 0.000319 |
| NM_052901 | 130113 | 5.90E−05 | NM_023003 | 10541 | 0.000152 |
| NM_006567 | 130403 | 8.09E−07 | NM_206967 | 20224 | 0.000148 |
| NM_015959 | 380315 | 0.0001248 | NM_015062 | 20647 | 0.000191 |
| NM_002348 | 450037 | 8.79E−05 | NM_182898 | 160132 | 0.000213 |
| NM_021872 | 460754 | 0.000253124 | NM_012426 | 160682 | 0.000377 |
| NM_018715 | 510450 | 1.80E−06 | NM_016292 | 160736 | 9.71E−05 |
| NM_000155 | 520332 | 8.15E−05 | NM_015953 | 380685 | 0.000244 |
| NM_000896 | 650164 | 0.000170918 | NM_002348 | 450037 | 0.000158 |
| CR596519 | 670041 | 6.83E−05 | NM_021872 | 460754 | 0.000351 |
| NM_015380 | 990273 | 0.000176623 | NM_018715 | 510450 | 5.75E−05 |
| NM_004927 | 1030692 | 0.000146305 | NM_000155 | 520332 | 2.00E−05 |
| NM_207107 | 1070377 | 0.000203913 | NM_002896 | 620722 | 0.000361 |
| NM_015292 | 1110215 | 3.74E−05 | NM_000896 | 650164 | 2.29E−05 |
| BC041984 | 1110358 | 0.000201154 | CR596519 | 670041 | 5.24E−05 |
| NM_000887 | 1240603 | 0.000236913 | NM_006427 | 830754 | 0.000392 |
| XM_377476 | 1340338 | 0.000233235 | AF272739 | 1050128 | 0.000316 |
| NM_001039708 | 1340731 | 5.81E−05 | NM_015292 | 1110215 | 5.97E−05 |
| NM_003343 | 1440382 | 0.000126291 | NM_006720 | 1110575 | 0.000394 |
| NM_016408 | 1440601 | 0.000195316 | NM_000887 | 1240603 | 0.000241 |
| NM_006306 | 1500040 | 0.000291636 | NM_021105 | 1260228 | 0.000289 |
| NM_014871 | 1740576 | 9.36E−05 | NM_016286 | 1410369 | 0.000395 |
| NM_018285 | 1780348 | 5.10E−05 | NM_000578 | 1430292 | 0.000338 |
| NM_001099786 | 1820598 | 6.60E−05 | NM_015039 | 1580348 | 0.000205 |
| NM_012155 | 2030450 | 0.000283925 | NM_018285 | 1780348 | 0.000158 |
| XM_936353 | 2030544 | 0.000118328 | NM_001099786 | 1820598 | 5.51E−05 |
| NM_198196 | 2100333 | 0.000249598 | NM_024108 | 1980424 | 0.00027 |
| NM_001077692 | 2120681 | 0.000202234 | NM_004226 | 2100035 | 0.000292 |
| NM_207111 | 2190524 | 0.0001217 | NM_198196 | 2100333 | 0.000398 |
| NM_014738 | 2190673 | 4.12E−05 | NM_014738 | 2190673 | 0.000148 |
| NM_007115 | 2370524 | 4.06E−06 | NM_007115 | 2370524 | 3.63E−06 |
| NM_016478 | 2370593 | 0.000228737 | T03068 | 2450497 | 6.26E−05 |
| BX096685 | 2450343 | 0.000103314 | NM_025153 | 2630484 | 3.78E−05 |
| T03068 | 2450497 | 0.000235319 | NM_005980 | 2640609 | 0.000121 |
| NM_006031 | 2480082 | 0.000250813 | NM_001014838 | 2690609 | 0.000394 |
| NM_001076785 | 2480402 | 0.000171592 | NM_003707 | 2750408 | 0.000173 |
| NM_020408 | 2630181 | 0.000135713 | NM_031488 | 3120301 | 0.000108 |
| NM_003528 | 2630451 | 0.000263022 | NM_014941 | 3360364 | 4.62E−05 |
| NM_025153 | 2630484 | 3.24E−05 | NM_207311 | 3420343 | 0.000375 |
| NM_213636 | 2680682 | 0.000119947 | NM_015288 | 3420735 | 0.000203 |
| NM_001014838 | 2690609 | 0.00026644 | NM_139244 | 3460189 | 0.000136 |
| NM_001854 | 2750070 | 0.000215687 | NM_003137 | 3460674 | 4.63E−05 |
| NM_015135 | 2750521 | 1.66E−05 | NM_003707 | 3520082 | 5.68E−05 |
| NM_005082 | 2850576 | 0.000150478 | NM_213566 | 3520192 | 0.000198 |
| NM_001384 | 2900524 | 0.000145624 | XM_930898 | 3830390 | 0.00019 |
| NM_031488 | 3120301 | 5.41E−05 | NM_005225 | 3940338 | 0.000175 |
| NM_020750 | 3130711 | 0.000215113 | XM_940524 | 3940368 | 0.00018 |
| NM_016089 | 3170468 | 0.000221173 | X00437 | 3990639 | 7.12E−05 |
| NM_152735 | 3290019 | 0.000144544 | NM_022827 | 4120133 | 0.000262 |
| NM_014941 | 3360364 | 2.76E−05 | NM_001779 | 4150161 | 0.000305 |
| NM_015002 | 3400372 | 0.000174547 | AA868051 | 4150402 | 0.000383 |
| NM_207311 | 3420343 | 0.00018972 | NM_001042631 | 4220138 | 0.000175 |
| NM_012110 | 3440431 | 0.00014229 | NM_020414 | 4280332 | 4.19E−05 |
| NM_003137 | 3460674 | 0.000114516 | NM_015651 | 4540082 | 0.000227 |
| NM_003707 | 3520082 | 3.93E−05 | NM_003543 | 4730195 | 8.13E−05 |
| NM_213566 | 3520192 | 3.69E−05 | NM_016553 | 4760543 | 9.71E−05 |
| NM_005476 | 3610504 | 2.07E−05 | NM_012413 | 4780672 | 0.000392 |
| NM_004092 | 3840022 | 0.000122704 | NM_006725 | 4850192 | 0.000207 |
| NM_003496 | 3850286 | 0.000181352 | NM_016552 | 4850541 | 0.000202 |
| XM_496059 | 3990465 | 0.000230631 | NM_015239 | 4860132 | 0.000272 |
| X00437 | 3990639 | 6.35E−05 | NM_014281 | 4900053 | 6.86E−05 |
| NM_004811 | 4060131 | 0.000261106 | NM_007047 | 4920577 | 0.000119 |
| NM_015721 | 4200538 | 8.54E−05 | NM_032312 | 5290289 | 0.000172 |
| NM_024600 | 4210647 | 4.75E−05 | NM_006321 | 5390669 | 0.000373 |
| NM_001042631 | 4220138 | 4.77E−05 | NM_152272 | 5550746 | 0.00039 |
| NM_020414 | 4280332 | 8.56E−05 | NM_013270 | 5690037 | 1.52E−05 |
| NM_015651 | 4540082 | 0.000102476 | NM_032118 | 5700403 | 0.000289 |
| NM_015433 | 4540301 | 1.61E−05 | NM_173791 | 5720398 | 0.000249 |
| NM_003543 | 4730195 | 3.83E−05 | BU733214 | 5860196 | 0.000365 |
| CK300859 | 4730577 | 0.000174021 | NM_006082 | 5900156 | 0.000375 |
| NM_016553 | 4760543 | 9.00E−06 | XM_931928 | 6110537 | 0.0003 |
| NM_005243 | 4780743 | 0.000257451 | NM_004044 | 6110768 | 4.01E−05 |
| NM_030811 | 4830435 | 0.00029784 | NM_000074 | 6270128 | 0.000192 |
| NM_006725 | 4850192 | 0.000196735 | XM_936128 | 6290561 | 0.00025 |
| NM_021809 | 4850438 | 2.80E−05 | NM_033416 | 6380598 | 0.000273 |
| NM_014281 | 4900053 | 4.21E−05 | NM_033554 | 6480500 | 0.000219 |
| NM_003559 | 5090477 | 0.000263019 | NM_024619 | 6590386 | 5.24E−05 |
| NM_017415 | 5090739 | 0.000149548 | NM_018384 | 6960746 | 5.22E−05 |
| NM_000075 | 5270500 | 6.52E−05 | NM_004776 | 6980070 | 0.000267 |
| NM_022730 | 5310050 | 9.54E−05 | NM_182476 | 7050543 | 0.000185 |
| NM_001033667 | 5310136 | 0.000229653 | NM_006429 | 7150017 | 0.000297 |
| NM_003906 | 5390131 | 1.50E−05 | NM_006901 | 7150634 | 0.000149 |
| NM_006321 | 5390669 | 6.58E−05 | NM_016237 | 7380288 | 0.000209 |
| NM_152272 | 5550746 | 0.000202311 | NM_001152 | 7550537 | 9.37E−05 |
| NM_013270 | 5690037 | 0.000282072 | | | |
| NM_032118 | 5700403 | 0.000211664 | | | |
| NM_006082 | 5900156 | 0.000243738 | | | |
| NM_170699 | 5960035 | 0.000109508 | | | |
| NM_007255 | 6100220 | 0.000110106 | | | |
| NM_004044 | 6110768 | 1.64E−05 | | | |
| NM_005771 | 6220450 | 0.000188396 | | | |
| NM_005968 | 6270021 | 8.58E−05 | | | |
| NM_000074 | 6270128 | 7.83E−06 | | | |
| NM_033416 | 6380598 | 5.97E−05 | | | |
| NM_001005332 | 6480170 | 0.000147564 | | | |
| NM_033554 | 6480500 | 0.000263731 | | | |
| XR_018793 | 6550142 | 0.000155407 | | | |
| NM_024619 | 6590386 | 2.83E−05 | | | |
| NM_001007224 | 6590523 | 0.00018882 | | | |
| NM_015540 | 6860243 | 5.47E−05 | | | |
| NM_018384 | 6960746 | 4.44E−05 | | | |
| NM_004776 | 6980070 | 6.06E−05 | | | |
| NM_138576 | 7000133 | 8.72E−05 | | | |
| NM_018380 | 7000224 | 0.000282503 | | | |
| NM_025263 | 7000408 | 0.000238786 | | | |
| NM_022163 | 7040598 | 0.000212169 | | | |
| NM_182476 | 7050543 | 0.000106626 | | | |
| NM_078483 | 7100136 | 0.000145165 | | | |
| NM_004623 | 7100504 | 0.000270702 | | | |
| NM_014165 | 7150601 | 7.64E−05 | | | |
| NM_006901 | 7150634 | 7.48E−05 | | | |
| NM_014976 | 7160296 | 0.000167977 | | | |
| NM_016237 | 7380288 | 9.42E−05 | | | |
| NM_001152 | 7550537 | 3.05E−05 | | | |

| | |
|---|---|
| List 18 | List 19 |

| AUC | | 1.00 | | | 0.83 |
|---|---|---|---|---|---|
| Number of | | 58 | | | 89 |
| Transcripts | | | | | |
| | | | | Probe | |
| Acc.-No. | Probe ID | p-Value | Acc.-No. | ID | p-Value |
| NM_015062 | 20647 | 0.00029 | NM_015959 | 380315 | 0.0003 |
| NM_182898 | 160132 | 0.000337 | NM_002348 | 450037 | 0.000157 |
| BM981444 | 240653 | 0.00033 | NM_021872 | 460754 | 0.000306 |
| NM_002348 | 450037 | 0.000343 | NM_018715 | 510450 | 1.30E−05 |
| NM_018715 | 510450 | 0.000131 | NM_000155 | 520332 | 6.03E−05 |
| NM_000155 | 520332 | 2.35E−05 | NM_002896 | 620722 | 0.000193 |
| NM_002129 | 610563 | 0.000374 | CR596519 | 670041 | 4.42E−05 |
| NM_000896 | 650164 | 0.00015 | NM_004927 | 1030692 | 6.28E−05 |
| CR596519 | 670041 | 0.000147 | AF272739 | 1050128 | 0.000205 |
| AF272739 | 1050128 | 0.000152 | NM_015292 | 1110215 | 4.92E−05 |
| NM_015292 | 1110215 | 0.00015 | NM_000887 | 1240603 | 0.000262 |
| NM_000878 | 1170307 | 0.000104 | NM_000578 | 1430292 | 0.000314 |
| NM_000887 | 1240603 | 0.000197 | NM_016408 | 1440601 | 4.37E−05 |
| NM_015039 | 1580348 | 0.000112 | NM_015039 | 1580348 | 0.000304 |
| NM_018285 | 1780348 | 0.000315 | NM_018285 | 1780348 | 0.00013 |
| NM_004226 | 2100035 | 0.000361 | NM_001099786 | 1820598 | 3.38E−05 |
| NM_198196 | 2100333 | 0.000214 | XM_936353 | 2030544 | 0.00027 |
| NM_014738 | 2190673 | 0.000171 | NM_001077692 | 2120681 | 0.000383 |
| XM_935843 | 2260446 | 0.000147 | NM_014738 | 2190673 | 0.000294 |
| NM_007115 | 2370524 | 5.38E−06 | NM_007115 | 2370524 | 1.79E−05 |
| T03068 | 2450497 | 0.000187 | BX096685 | 2450343 | 0.000243 |
| NM_025153 | 2630484 | 4.79E−05 | T03068 | 2450497 | 5.57E−05 |
| NM_001014838 | 2690609 | 0.000385 | NM_025153 | 2630484 | 9.60E−05 |
| NM_001414 | 2760563 | 0.000392 | NM_019111 | 2680370 | 0.000297 |
| NM_031488 | 3120301 | 7.69E−05 | NM_001014838 | 2690609 | 9.68E−05 |
| NM_014941 | 3360364 | 0.000147 | NM_005449 | 2760092 | 0.000386 |
| NM_015288 | 3420735 | 0.000198 | NM_001414 | 2760563 | 0.000352 |
| NM_003137 | 3460674 | 0.000151 | NM_005082 | 2850576 | 0.0003 |
| NM_213566 | 3520192 | 0.000105 | NM_031488 | 3120301 | 0.000101 |
| XM_930898 | 3830390 | 0.000161 | NM_006767 | 3140093 | 9.93E−05 |
| X00437 | 3990639 | 0.000235 | NM_015710 | 3170092 | 0.000305 |
| AA868051 | 4150402 | 0.000207 | NM_014941 | 3360364 | 7.94E−05 |
| NM_024600 | 4210647 | 0.000148 | NM_001042600 | 3420630 | 0.000387 |
| NM_020414 | 4280332 | 0.000117 | NM_003137 | 3460674 | 0.000106 |
| NM_015651 | 4540082 | 0.000304 | NM_003707 | 3520082 | 0.000268 |
| NM_003543 | 4730195 | 0.000236 | NM_213566 | 3520192 | 0.000257 |
| NM_001017404 | 4760364 | 0.00038 | NM_005476 | 3610504 | 5.91E−06 |
| NM_016553 | 4760543 | 4.28E−05 | X00437 | 3990639 | 7.90E−05 |
| NM_006725 | 4850192 | 0.000318 | NM_004811 | 4060131 | 0.000337 |
| NM_016552 | 4850541 | 0.000256 | NM_022827 | 4120133 | 0.00028 |
| NM_014281 | 4900053 | 9.51E−05 | NM_024600 | 4210647 | 0.000218 |
| AA431917 | 5130154 | 0.00036 | NM_001042631 | 4220138 | 3.86E−05 |
| NM_032312 | 5290289 | 0.000232 | NM_020414 | 4280332 | 0.000117 |
| NM_001007239 | 5310754 | 0.000388 | NM_015651 | 4540082 | 0.000122 |
| NM_013270 | 5690037 | 5.68E−05 | NM_001024667 | 4590646 | 0.000137 |
| NM_032118 | 5700403 | 0.000329 | NM_003543 | 4730195 | 0.000136 |
| NM_003645 | 6110328 | 0.000347 | CK300859 | 4730577 | 0.000288 |
| NM_004044 | 6110768 | 0.000153 | NM_016553 | 4760543 | 3.10E−05 |
| NM_000074 | 6270128 | 0.000174 | NM_005243 | 4780743 | 0.000104 |
| NM_002964 | 6280576 | 0.000386 | NM_006725 | 4850192 | 0.000138 |
| AK128384 | 6420541 | 0.000366 | NM_014281 | 4900053 | 4.57E−05 |
| NM_033554 | 6480500 | 0.000209 | NM_007047 | 4920577 | 0.000318 |
| NM_024619 | 6590386 | 0.000208 | NM_007355 | 5130082 | 0.000293 |
| NM_018384 | 6960746 | 0.000158 | NM_000075 | 5270500 | 0.000307 |
| NM_004776 | 6980070 | 0.000353 | NM_001007239 | 5310754 | 0.000134 |
| NM_182476 | 7050543 | 0.000265 | NM_003906 | 5390131 | 0.000193 |
| NM_078483 | 7100136 | 0.000348 | NM_152272 | 5550746 | 0.000311 |
| NM_001152 | 7550537 | 0.000125 | NM_013270 | 5690037 | 0.000207 |
| | | | NM_002139 | 5690673 | 0.00033 |
| | | | NM_032118 | 5700403 | 0.000303 |
| | | | NM_001628 | 5890327 | 0.000232 |
| | | | NM_178510 | 5910091 | 3.75E−05 |
| | | | NM_170699 | 5960035 | 0.000309 |
| | | | NM_007255 | 6100220 | 0.000328 |
| | | | NM_144666 | 6110142 | 0.000278 |
| | | | XM_931928 | 6110537 | 0.000164 |
| | | | NM_004044 | 6110768 | 0.00024 |
| | | | NM_005968 | 6270021 | 5.91E−05 |
| | | | NM_000074 | 6270128 | 2.40E−05 |
| | | | NM_001039508 | 6280754 | 0.000111 |
| | | | XM_936128 | 6290561 | 0.000182 |
| | | | NM_033416 | 6380598 | 0.000216 |
| | | | NM_001005332 | 6480170 | 0.000377 |
| | | | NM_025150 | 6480328 | 0.000272 |
| | | | NM_033554 | 6480500 | 0.00015 |
| | | | XR_018793 | 6550142 | 0.000362 |
| | | | NM_024619 | 6590386 | 4.64E−05 |
| | | | NM_015540 | 6860243 | 0.00038 |
| | | | NM_004964 | 6940242 | 0.000349 |
| | | | NM_018384 | 6960746 | 9.79E−05 |
| | | | NM_014165 | 7150601 | 0.00013 |
| | | | NM_006901 | 7150634 | 6.17E−05 |
| | | | NM_014976 | 7160296 | 0.000121 |
| | | | NM_003757 | 7320576 | 0.000262 |
| | | | NM_007167 | 7380274 | 0.000374 |
| | | | NM_016237 | 7380288 | 0.000189 |
| | | | NM_199176 | 7380736 | 0.000151 |
| | | | NM_004515 | 7400431 | 0.000268 |
| | | | NM_001152 | 7550537 | 3.79E−05 |

| | |
|---|---|
| List 20 | List 21 |

| AUC | | 0.8 | | | 0.8125 |
|---|---|---|---|---|---|
| Number of | | 140 | | | 94 |
| Transcripts | | | | | |
| Acc.-No. | Probe ID | p-Value | Acc.-No. | Probe ID | p-Value |
| NM_001031717 | 10338 | 0.000148 | NM_005621 | 10279 | 0.000319 |
| NM_052901 | 130113 | 5.90E−05 | NM_023003 | 10541 | 0.000152 |
| NM_006567 | 130403 | 8.09E−07 | NM_206967 | 20224 | 0.000148 |
| NM_016292 | 160736 | 0.000312 | NM_015062 | 20647 | 0.000191 |
| NM_015959 | 380315 | 0.000125 | NM_182898 | 160132 | 0.000213 |
| NM_002348 | 450037 | 8.79E−05 | NM_012426 | 160682 | 0.000377 |
| NM_021872 | 460754 | 0.000253 | NM_016292 | 160736 | 9.71E−05 |
| NM_018715 | 510450 | 1.80E−06 | NM_015953 | 380685 | 0.000244 |
| NM_000155 | 520332 | 8.15E−05 | NM_002348 | 450037 | 0.000158 |
| NM_024662 | 630768 | 0.000363 | NM_021872 | 460754 | 0.000351 |
| NM_000896 | 650164 | 0.000171 | NM_018715 | 510450 | 5.75E−05 |
| CR596519 | 670041 | 6.83E−05 | NM_000155 | 520332 | 2.00E−05 |
| NM_015380 | 990273 | 0.000177 | NM_002129 | 610563 | 0.000424 |
| NM_004927 | 1030692 | 0.000146 | NM_002896 | 620722 | 0.000361 |
| NM_207107 | 1070377 | 0.000204 | NM_000896 | 650164 | 2.29E−05 |
| NM_015292 | 1110215 | 3.74E−05 | CR596519 | 670041 | 5.24E−05 |
| BC041984 | 1110358 | 0.000201 | NM_006427 | 830754 | 0.000392 |
| NM_000887 | 1240603 | 0.000237 | AF272739 | 1050128 | 0.000316 |
| XM_377476 | 1340338 | 0.000233 | NM_015292 | 1110215 | 5.97E−05 |
| NM_001039708 | 1340731 | 5.81E−05 | NM_006720 | 1110575 | 0.000394 |
| NM_000578 | 1430292 | 0.000305 | NM_000887 | 1240603 | 0.000241 |
| NM_000819 | 1430730 | 0.000332 | NM_021105 | 1260228 | 0.000289 |
| NM_003343 | 1440382 | 0.000126 | NM_016286 | 1410369 | 0.000395 |
| NM_002080 | 1440546 | 0.000371 | NM_000578 | 1430292 | 0.000338 |
| NM_016408 | 1440601 | 0.000195 | NM_002080 | 1440546 | 0.000463 |
| NM_006306 | 1500040 | 0.000292 | NM_015039 | 1580348 | 0.000205 |
| NM_153201 | 1690189 | 0.000387 | NM_018285 | 1780348 | 0.000158 |
| NM_002405 | 1710286 | 0.000338 | NM_001099786 | 1820598 | 5.51E−05 |
| NM_014871 | 1740576 | 9.36E−05 | NM_024108 | 1980424 | 0.00027 |
| NM_018285 | 1780348 | 5.10E−05 | XM_936353 | 2030544 | 0.000437 |
| NM_001099786 | 1820598 | 6.60E−05 | NM_004226 | 2100035 | 0.000292 |
| NM_012155 | 2030450 | 0.000284 | NM_198196 | 2100333 | 0.000398 |
| XM_936353 | 2030544 | 0.000118 | NM_014738 | 2190673 | 0.000148 |
| NM_198196 | 2100333 | 0.00025 | NM_007115 | 2370524 | 3.63E−06 |
| NM_001077692 | 2120681 | 0.000202 | T03068 | 2450497 | 6.26E−05 |
| NM_207111 | 2190524 | 0.000122 | NM_025153 | 2630484 | 3.78E−05 |
| NM_014738 | 2190673 | 4.12E−05 | NM_005980 | 2640609 | 0.000121 |
| NM_007115 | 2370524 | 4.06E−06 | NM_001014838 | 2690609 | 0.000394 |
| NM_016478 | 2370593 | 0.000229 | NM_003707 | 2750408 | 0.000173 |
| BX096685 | 2450343 | 0.000103 | NM_031488 | 3120301 | 0.000108 |
| T03068 | 2450497 | 0.000235 | NM_017905 | 3130091 | 0.000411 |
| NM_006031 | 2480082 | 0.000251 | NM_014941 | 3360364 | 4.62E−05 |
| NM_001076785 | 2480402 | 0.000172 | NM_207311 | 3420343 | 0.000375 |
| NM_020408 | 2630181 | 0.000136 | NM_015288 | 3420735 | 0.000203 |
| NM_003528 | 2630451 | 0.000263 | NM_139244 | 3460189 | 0.000136 |
| NM_025153 | 2630484 | 3.24E−05 | NM_003137 | 3460674 | 4.63E−05 |
| NM_001025603 | 2640373 | 0.000342 | NM_003707 | 3520082 | 5.68E−05 |
| NM_213636 | 2680682 | 0.00012 | NM_213566 | 3520192 | 0.000198 |
| NM_001014838 | 2690609 | 0.000266 | XM_930898 | 3830390 | 0.00019 |
| NM_001854 | 2750070 | 0.000216 | NM_005225 | 3940338 | 0.000175 |
| NM_015135 | 2750521 | 1.66E−05 | XM_940524 | 3940368 | 0.00018 |
| NM_001414 | 2760563 | 0.000336 | X00437 | 3990639 | 7.12E−05 |
| NM_005082 | 2850576 | 0.00015 | NM_030915 | 4120086 | 0.000447 |
| NM_001384 | 2900524 | 0.000146 | NM_022827 | 4120133 | 0.000262 |
| NM_031488 | 3120301 | 5.41E−05 | NM_001779 | 4150161 | 0.000305 |
| NM_020750 | 3130711 | 0.000215 | AA868051 | 4150402 | 0.000383 |
| NM_006767 | 3140093 | 0.000376 | NM_015721 | 4200538 | 0.000495 |
| NM_016089 | 3170468 | 0.000221 | NM_001042631 | 4220138 | 0.000175 |
| NM_152735 | 3290019 | 0.000145 | NM_020414 | 4280332 | 4.19E−05 |
| NM_014941 | 3360364 | 2.76E−05 | NM_015651 | 4540082 | 0.000227 |
| NM_005698 | 3370687 | 0.000334 | NM_003543 | 4730195 | 8.13E−05 |
| NM_015002 | 3400372 | 0.000175 | NM_016553 | 4760543 | 9.71E−05 |
| NM_207311 | 3420343 | 0.00019 | NM_012413 | 4780672 | 0.000392 |
| NM_015288 | 3420735 | 0.000328 | NM_006725 | 4850192 | 0.000207 |
| NM_012110 | 3440431 | 0.000142 | NM_016552 | 4850541 | 0.000202 |
| NM_003137 | 3460674 | 0.000115 | NM_015239 | 4860132 | 0.000272 |
| NM_003707 | 3520082 | 3.93E−05 | NM_032320 | 4860296 | 0.00046 |
| NM_213566 | 3520192 | 3.69E−05 | NM_014281 | 4900053 | 6.86E−05 |
| NM_005476 | 3610504 | 2.07E−05 | NM_007047 | 4920577 | 0.000119 |
| NM_002883 | 3710189 | 0.00034 | NM_032312 | 5290289 | 0.000172 |
| XM_930898 | 3830390 | 0.000366 | NM_006321 | 5390669 | 0.000373 |
| NM_004092 | 3840022 | 0.000123 | NM_152272 | 5550746 | 0.00039 |
| NM_003496 | 3850286 | 0.000181 | NM_013270 | 5690037 | 1.52E−05 |
| XM_940524 | 3940368 | 0.000377 | NM_032118 | 5700403 | 0.000289 |
| NM_012111 | 3990192 | 0.000308 | NM_173791 | 5720398 | 0.000249 |
| XM_496059 | 3990465 | 0.000231 | BU733214 | 5860196 | 0.000365 |
| X00437 | 3990639 | 6.35E−05 | NM_006082 | 5900156 | 0.000375 |
| NM_015054 | 4060056 | 0.000332 | NM_007255 | 6100220 | 0.000447 |
| NM_004811 | 4060131 | 0.000261 | XM_931928 | 6110537 | 0.0003 |
| NM_015721 | 4200538 | 8.54E−05 | NM_004044 | 6110768 | 4.01E−05 |
| NM_024600 | 4210647 | 4.75E−05 | NM_000074 | 6270128 | 0.000192 |
| NM_001042631 | 4220138 | 4.77E−05 | XM_936128 | 6290561 | 0.00025 |
| NM_020414 | 4280332 | 8.56E−05 | NM_033416 | 6380598 | 0.000273 |
| NM_015651 | 4540082 | 0.000102 | NM_033554 | 6480500 | 0.000219 |
| NM_015433 | 4540301 | 1.61E−05 | NM_024619 | 6590386 | 5.24E−05 |
| NM_025228 | 4640528 | 0.000324 | NM_018384 | 6960746 | 5.22E−05 |
| NM_003543 | 4730195 | 3.83E−05 | NM_004776 | 6980070 | 0.000267 |
| CK300859 | 4730577 | 0.000174 | NM_182476 | 7050543 | 0.000185 |
| NM_016553 | 4760543 | 9.00E−06 | NM_006429 | 7150017 | 0.000297 |
| NM_005243 | 4780743 | 0.000257 | NM_006901 | 7150634 | 0.000149 |
| NM_030811 | 4830435 | 0.000298 | NM_014976 | 7160296 | 0.000428 |
| NM_012321 | 4830563 | 0.000308 | NM_016237 | 7380288 | 0.000209 |
| NM_006725 | 4850192 | 0.000197 | NM_001152 | 7550537 | 9.37E−05 |
| NM_021809 | 4850438 | 2.80E−05 | NM_024681 | 7650605 | 0.00042 |
| NM_014281 | 4900053 | 4.21E−05 | | | |
| NM_003559 | 5090477 | 0.000263 | | | |
| NM_017415 | 5090739 | 0.00015 | | | |
| NM_000075 | 5270500 | 6.52E−05 | | | |
| NM_022730 | 5310050 | 9.54E−05 | | | |
| NM_001033667 | 5310136 | 0.00023 | | | |
| NM_003906 | 5390131 | 1.50E−05 | | | |
| NM_006321 | 5390669 | 6.58E−05 | | | |
| NM_152272 | 5550746 | 0.000202 | | | |
| NM_013270 | 5690037 | 0.000282 | | | |
| NM_032118 | 5700403 | 0.000212 | | | |
| NM_031449 | 5720424 | 0.000386 | | | |
| NM_006082 | 5900156 | 0.000244 | | | |
| NM_178510 | 5910091 | 0.000339 | | | |
| NM_170699 | 5960035 | 0.00011 | | | |
| NM_007255 | 6100220 | 0.00011 | | | |
| NM_004044 | 6110768 | 1.64E−05 | | | |
| NM_005771 | 6220450 | 0.000188 | | | |
| NM_005968 | 6270021 | 8.58E−05 | | | |
| NM_000074 | 6270128 | 7.83E−06 | | | |
| NM_001039508 | 6280754 | 0.000368 | | | |
| NM_003632 | 6350017 | 0.000306 | | | |
| NM_033416 | 6380598 | 5.97E−05 | | | |
| NM_001005332 | 6480170 | 0.000148 | | | |
| NM_025150 | 6480328 | 0.000394 | | | |
| NM_033554 | 6480500 | 0.000264 | | | |
| XR_018793 | 6550142 | 0.000155 | | | |
| NM_024619 | 6590386 | 2.83E−05 | | | |
| NM_001007224 | 6590523 | 0.000189 | | | |
| NM_015540 | 6860243 | 5.47E−05 | | | |
| NM_004964 | 6940242 | 0.000309 | | | |
| NM_001033515 | 6960328 | 0.0003 | | | |
| NM_018384 | 6960746 | 4.44E−05 | | | |
| NM_004776 | 6980070 | 6.06E−05 | | | |
| NM_138576 | 7000133 | 8.72E−05 | | | |
| NM_018380 | 7000224 | 0.000283 | | | |
| NM_025263 | 7000408 | 0.000239 | | | |
| NM_022163 | 7040598 | 0.000212 | | | |
| NM_182476 | 7050543 | 0.000107 | | | |
| NM_078483 | 7100136 | 0.000145 | | | |
| NM_004623 | 7100504 | 0.000271 | | | |
| NM_014165 | 7150601 | 7.64E−05 | | | |
| NM_006901 | 7150634 | 7.48E−05 | | | |
| NM_014976 | 7160296 | 0.000168 | | | |
| NM_016237 | 7380288 | 9.42E−05 | | | |
| NM_001152 | 7550537 | 3.05E−05 | | | |

| | |
|---|---|
| List 22 | List 23 |

| AUC | | 1 | | | 0.833 |
|---|---|---|---|---|---|
| Number of | | 71 | | | 39 |
| Transcripts | | | | | |
| Acc.-No. | Probe ID | p-Value | Acc.-No. | Probe ID | p-Value |
| NM_015062 | 20647 | 0.00029 | NM_002348 | 450037 | 0.000351 |
| NM_182898 | 160132 | 0.000337 | NM_018715 | 510450 | 0.000153 |
| BM981444 | 240653 | 0.00033 | NM_000155 | 520332 | 0.000379 |
| NM_002348 | 450037 | 0.000343 | NM_000896 | 650164 | 4.19E−05 |
| NM_018715 | 510450 | 0.000131 | CR596519 | 670041 | 0.000321 |
| NM_000155 | 520332 | 2.35E−05 | XR_015582 | 770452 | 0.000289 |
| NM_002129 | 610563 | 0.000374 | AF272739 | 1050128 | 8.83E−05 |
| NM_000896 | 650164 | 0.00015 | NM_015039 | 1580348 | 0.000316 |
| CR596519 | 670041 | 0.000147 | NM_007115 | 2370524 | 2.66E−05 |
| AF272739 | 1050128 | 0.000152 | T03068 | 2450497 | 9.16E−05 |
| NM_015292 | 1110215 | 0.00015 | NM_031412 | 2630154 | 0.000461 |
| NM_000878 | 1170307 | 0.000104 | NM_003528 | 2630451 | 0.000164 |
| NM_000887 | 1240603 | 0.000197 | NM_025153 | 2630484 | 5.73E−06 |
| NM_015039 | 1580348 | 0.000112 | NM_031488 | 3120301 | 0.000356 |
| NM_018285 | 1780348 | 0.000315 | NM_014941 | 3360364 | 0.000257 |
| NM_001099786 | 1820598 | 0.000486 | NM_003137 | 3460674 | 0.000329 |
| NM_004226 | 2100035 | 0.000361 | NM_213566 | 3520192 | 0.000494 |
| NM_198196 | 2100333 | 0.000214 | NM_005476 | 3610504 | 0.00042 |
| NM_014738 | 2190673 | 0.000171 | XM_930898 | 3830390 | 9.69E−05 |
| XM_935843 | 2260446 | 0.000147 | NM_020414 | 4280332 | 0.000499 |
| NM_007115 | 2370524 | 5.38E−06 | NM_003543 | 4730195 | 7.59E−05 |
| T03068 | 2450497 | 0.000187 | NM_016553 | 4760543 | 0.000244 |
| NM_003528 | 2630451 | 0.000475 | NM_014281 | 4900053 | 0.000355 |
| NM_025153 | 2630484 | 4.79E−05 | NM_003559 | 5090477 | 0.00048 |
| NM_001014838 | 2690609 | 0.000385 | NM_002150 | 5090554 | 0.000387 |
| NM_001414 | 2760563 | 0.000392 | NM_013270 | 5690037 | 0.000449 |
| NM_031488 | 3120301 | 7.69E−05 | NM_002808 | 5720497 | 0.000366 |
| NM_004555 | 3130291 | 0.000433 | BU733214 | 5860196 | 0.000376 |
| NM_014941 | 3360364 | 0.000147 | BM974838 | 5870300 | 0.000467 |
| NM_015288 | 3420735 | 0.000198 | NM_006082 | 5900156 | 0.000428 |
| NM_003137 | 3460674 | 0.000151 | XM_931928 | 6110537 | 0.000484 |
| NM_213566 | 3520192 | 0.000105 | NM_000074 | 6270128 | 0.000132 |
| XM_930898 | 3830390 | 0.000161 | NM_033416 | 6380598 | 0.000237 |
| XM_940524 | 3940368 | 0.00042 | NM_018384 | 6960746 | 0.000361 |
| X00437 | 3990639 | 0.000235 | NM_004776 | 6980070 | 0.000499 |
| NM_001779 | 4150161 | 0.00042 | BI915661 | 6980274 | 0.000463 |
| AA868051 | 4150402 | 0.000207 | NM_078483 | 7100136 | 0.000439 |
| NM_002756 | 4150632 | 0.000469 | NM_006901 | 7150634 | 0.000284 |
| NM_024600 | 4210647 | 0.000148 | NM_001152 | 7550537 | 0.000158 |
| NM_020414 | 4280332 | 0.000117 | | | |
| NM_015651 | 4540082 | 0.000304 | | | |
| NM_003543 | 4730195 | 0.000236 | | | |
| NM_001017404 | 4760364 | 0.00038 | | | |
| NM_016553 | 4760543 | 4.28E−05 | | | |
| NM_006725 | 4850192 | 0.000318 | | | |
| NM_016552 | 4850541 | 0.000256 | | | |
| NM_015239 | 4860132 | 0.000443 | | | |
| NM_014281 | 4900053 | 9.51E−05 | | | |
| AA431917 | 5130154 | 0.00036 | | | |
| NM_032312 | 5290289 | 0.000232 | | | |
| NM_001007239 | 5310754 | 0.000388 | | | |
| NM_013270 | 5690037 | 5.68E−05 | | | |
| NM_032118 | 5700403 | 0.000329 | | | |
| NM_006082 | 5900156 | 0.000438 | | | |
| NM_178510 | 5910091 | 0.000459 | | | |
| NM_003645 | 6110328 | 0.000347 | | | |
| NM_004044 | 6110768 | 0.000153 | | | |
| NM_000074 | 6270128 | 0.000174 | | | |
| NM_002964 | 6280576 | 0.000386 | | | |
| NM_033416 | 6380598 | 0.000425 | | | |
| AK128384 | 6420541 | 0.000366 | | | |
| NM_033554 | 6480500 | 0.000209 | | | |
| NM_024619 | 6590386 | 0.000208 | | | |
| AA576740 | 6840408 | 0.000455 | | | |
| NM_018384 | 6960746 | 0.000158 | | | |
| NM_004776 | 6980070 | 0.000353 | | | |
| NM_182476 | 7050543 | 0.000265 | | | |
| NM_078483 | 7100136 | 0.000348 | | | |
| NM_017481 | 7100392 | 0.000469 | | | |
| AW263210 | 7200477 | 0.000483 | | | |
| NM_001152 | 7550537 | 0.000125 | | | |

| | |
|---|---|
| List 24 | List 25 |

| AUC | | 0.833 | | | 0.8 |
|---|---|---|---|---|---|
| Number of | | 111 | | | 166 |
| Transcripts | | | | | |
| Acc.-No. | Probe ID | p-Value | Acc.-No. | Probe ID | p-Value |
| NM_006567 | 130403 | 0.00043 | NM_001031717 | 10338 | 0.00014759 |
| NM_016292 | 160736 | 0.000413 | NM_014669 | 50164 | 0.000430144 |
| NM_015959 | 380315 | 0.0003 | NM_052901 | 130113 | 5.90E−05 |
| NM_002348 | 450037 | 0.000157 | NM_006567 | 130403 | 8.09E−07 |
| NM_021872 | 460754 | 0.000306 | NM_016292 | 160736 | 0.000312362 |
| NM_018715 | 510450 | 1.30E−05 | NM_013378 | 360066 | 0.000426908 |
| NM_000155 | 520332 | 6.03E−05 | NM_015959 | 380315 | 0.0001248 |
| NM_002896 | 620722 | 0.000193 | NM_002348 | 450037 | 8.79E−05 |
| NM_000896 | 650164 | 0.000404 | NM_021872 | 460754 | 0.000253124 |
| CR596519 | 670041 | 4.42E−05 | NM_018715 | 510450 | 1.80E−06 |
| NM_004927 | 1030692 | 6.28E−05 | AK130294 | 520154 | 0.000474626 |
| AF272739 | 1050128 | 0.000205 | NM_000155 | 520332 | 8.15E−05 |
| NM_015292 | 1110215 | 4.92E−05 | NM_024662 | 630768 | 0.000363461 |
| NM_000887 | 1240603 | 0.000262 | NM_000896 | 650164 | 0.000170918 |
| XM_377476 | 1340338 | 0.000496 | CR596519 | 670041 | 6.83E−05 |
| NM_000578 | 1430292 | 0.000314 | NM_015380 | 990273 | 0.000176623 |
| NM_016408 | 1440601 | 4.37E−05 | NM_004927 | 1030692 | 0.000146305 |
| NM_015039 | 1580348 | 0.000304 | AF272739 | 1050128 | 0.000481314 |
| NM_018285 | 1780348 | 0.00013 | NM_207107 | 1070377 | 0.000203913 |
| NM_001099786 | 1820598 | 3.38E−05 | NM_015292 | 1110215 | 3.74E−05 |
| XM_936353 | 2030544 | 0.00027 | BC041984 | 1110358 | 0.000201154 |
| NM_001077692 | 2120681 | 0.000383 | NM_006720 | 1110575 | 0.000466948 |
| NM_014738 | 2190673 | 0.000294 | NM_000887 | 1240603 | 0.000236913 |
| NM_007115 | 2370524 | 1.79E−05 | NM_006066 | 1300768 | 0.000457682 |
| BX096685 | 2450343 | 0.000243 | XM_377476 | 1340338 | 0.000233235 |
| T03068 | 2450497 | 5.57E−05 | NM_001039708 | 1340731 | 5.81E−05 |
| NM_006031 | 2480082 | 0.000437 | NM_000578 | 1430292 | 0.00030453 |
| NM_031412 | 2630154 | 0.000422 | NM_000819 | 1430730 | 0.000332107 |
| NM_003528 | 2630451 | 0.000458 | NM_003343 | 1440382 | 0.000126291 |
| NM_025153 | 2630484 | 9.60E−05 | NM_002080 | 1440546 | 0.000371475 |
| NM_019111 | 2680370 | 0.000297 | NM_016408 | 1440601 | 0.000195316 |
| NM_001014838 | 2690609 | 9.68E−05 | NM_001037325 | 1470332 | 0.000410966 |
| NM_003707 | 2750408 | 0.000452 | NM_006306 | 1500040 | 0.000291636 |
| NM_015135 | 2750521 | 0.00042 | NM_015039 | 1580348 | 0.000479443 |
| NM_005449 | 2760092 | 0.000386 | NM_153201 | 1690189 | 0.000387483 |
| NM_001414 | 2760563 | 0.000352 | NM_002405 | 1710286 | 0.000338425 |
| NM_005082 | 2850576 | 0.0003 | NM_014871 | 1740576 | 9.36E−05 |
| NM_031488 | 3120301 | 0.000101 | NM_018285 | 1780348 | 5.10E−05 |
| NM_006767 | 3140093 | 9.93E−05 | NM_001099786 | 1820598 | 6.60E−05 |
| NM_015710 | 3170092 | 0.000305 | NM_012155 | 2030450 | 0.000283925 |
| NM_014941 | 3360364 | 7.94E−05 | XM_936353 | 2030544 | 0.000118328 |
| NM_207311 | 3420343 | 0.000462 | NM_198196 | 2100333 | 0.000249598 |
| NM_001042600 | 3420630 | 0.000387 | NM_001077692 | 2120681 | 0.000202234 |
| NM_139244 | 3460189 | 0.000483 | NM_207111 | 2190524 | 0.0001217 |
| NM_003137 | 3460674 | 0.000106 | NM_014738 | 2190673 | 4.12E−05 |
| NM_003707 | 3520082 | 0.000268 | NM_005356 | 2230661 | 0.000461017 |
| NM_213566 | 3520192 | 0.000257 | NM_007115 | 2370524 | 4.06E−06 |
| NM_005476 | 3610504 | 5.91E−06 | NM_016478 | 2370593 | 0.000228737 |
| XM_930898 | 3830390 | 0.000483 | BX096685 | 2450343 | 0.000103314 |
| X00437 | 3990639 | 7.90E−05 | T03068 | 2450497 | 0.000235319 |
| NM_004811 | 4060131 | 0.000337 | NM_006031 | 2480082 | 0.000250813 |
| NM_022827 | 4120133 | 0.00028 | NM_001076785 | 2480402 | 0.000171592 |
| NM_016091 | 4180142 | 0.000453 | NM_031412 | 2630154 | 0.00042291 |
| NM_015721 | 4200538 | 0.000448 | NM_020408 | 2630181 | 0.000135713 |
| NM_024600 | 4210647 | 0.000218 | NM_003528 | 2630451 | 0.000263022 |
| NM_001042631 | 4220138 | 3.86E−05 | NM_025153 | 2630484 | 3.24E−05 |
| BU608944 | 4220523 | 0.00047 | NM_052853 | 2630524 | 0.000444478 |
| NM_020414 | 4280332 | 0.000117 | NM_001025603 | 2640373 | 0.000341999 |
| NM_015651 | 4540082 | 0.000122 | NM_019111 | 2680370 | 0.000447688 |
| NM_006445 | 4590082 | 0.000457 | NM_213636 | 2680682 | 0.000119947 |
| NM_001024667 | 4590646 | 0.000137 | NM_001014838 | 2690609 | 0.00026644 |
| NM_003543 | 4730195 | 0.000136 | NM_003059 | 2710397 | 0.000429319 |
| CK300859 | 4730577 | 0.000288 | NM_001854 | 2750070 | 0.000215687 |
| NM_016553 | 4760543 | 3.10E−05 | NM_018233 | 2750242 | 0.00041359 |
| NM_005243 | 4780743 | 0.000104 | NM_003707 | 2750408 | 0.000470087 |
| NM_006725 | 4850192 | 0.000138 | NM_015135 | 2750521 | 1.66E−05 |
| NM_014281 | 4900053 | 4.57E−05 | NM_001414 | 2760563 | 0.000335608 |
| NM_007047 | 4920577 | 0.000318 | NM_005082 | 2850576 | 0.000150478 |
| NM_007355 | 5130082 | 0.000293 | NM_001384 | 2900524 | 0.000145624 |
| NM_000075 | 5270500 | 0.000307 | NM_031488 | 3120301 | 5.41E−05 |
| NM_001007239 | 5310754 | 0.000134 | NM_020750 | 3130711 | 0.000215113 |
| NM_003906 | 5390131 | 0.000193 | NM_006767 | 3140093 | 0.000376303 |
| NM_152272 | 5550746 | 0.000311 | NM_016089 | 3170468 | 0.000221173 |
| CR738137 | 5570632 | 0.000422 | NM_152735 | 3290019 | 0.000144544 |
| NM_013270 | 5690037 | 0.000207 | NM_014941 | 3360364 | 2.76E−05 |
| NM_002139 | 5690673 | 0.00033 | NM_005698 | 3370687 | 0.000333845 |
| NM_032118 | 5700403 | 0.000303 | NM_015002 | 3400372 | 0.000174547 |
| NM_001628 | 5890327 | 0.000232 | NM_207311 | 3420343 | 0.00018972 |
| NM_006082 | 5900156 | 0.000463 | NM_015288 | 3420735 | 0.000328412 |
| NM_178510 | 5910091 | 3.75E−05 | NM_012110 | 3440431 | 0.00014229 |
| NM_170699 | 5960035 | 0.000309 | NM_003137 | 3460674 | 0.000114516 |
| NM_014230 | 6020402 | 0.000423 | NM_003707 | 3520082 | 3.93E−05 |
| NM_007255 | 6100220 | 0.000328 | NM_213566 | 3520192 | 3.69E−05 |
| NM_144666 | 6110142 | 0.000278 | NM_005476 | 3610504 | 2.07E−05 |
| XM_931928 | 6110537 | 0.000164 | NM_002883 | 3710189 | 0.000340109 |
| NM_004044 | 6110768 | 0.00024 | NM_018129 | 3780220 | 0.000440152 |
| NM_005968 | 6270021 | 5.91E−05 | XM_930898 | 3830390 | 0.000366322 |
| NM_000074 | 6270128 | 2.40E−05 | NM_004092 | 3840022 | 0.000122704 |
| NM_015044 | 6270364 | 0.000463 | NM_025152 | 3840131 | 0.00044282 |
| NM_001039508 | 6280754 | 0.000111 | NM_003496 | 3850286 | 0.000181352 |
| XM_936128 | 6290561 | 0.000182 | XM_940524 | 3940368 | 0.000376819 |
| NM_033416 | 6380598 | 0.000216 | NM_012111 | 3990192 | 0.000307617 |
| NM_001005332 | 6480170 | 0.000377 | XM_496059 | 3990465 | 0.000230631 |
| NM_025150 | 6480328 | 0.000272 | X00437 | 3990639 | 6.35E−05 |
| NM_033554 | 6480500 | 0.00015 | NM_015054 | 4060056 | 0.000331609 |
| XR_018793 | 6550142 | 0.000362 | NM_004811 | 4060131 | 0.000261106 |
| NM_024619 | 6590386 | 4.64E−05 | NM_145298 | 4070132 | 0.00044159 |
| NM_015540 | 6860243 | 0.00038 | NM_015721 | 4200538 | 8.54E−05 |
| NM_004964 | 6940242 | 0.000349 | NM_024600 | 4210647 | 4.75E−05 |
| NM_018384 | 6960746 | 9.79E−05 | NM_001042631 | 4220138 | 4.77E−05 |
| BI915661 | 6980274 | 0.000496 | NM_020414 | 4280332 | 8.56E−05 |
| NM_078483 | 7100136 | 0.000449 | NM_015651 | 4540082 | 0.000102476 |
| NM_014165 | 7150601 | 0.00013 | NM_015433 | 4540301 | 1.61E−05 |
| NM_006901 | 7150634 | 6.17E−05 | NM_025228 | 4640528 | 0.000323829 |
| NM_014976 | 7160296 | 0.000121 | NM_003543 | 4730195 | 3.83E−05 |
| NM_003757 | 7320576 | 0.000262 | CK300859 | 4730577 | 0.000174021 |
| NM_007167 | 7380274 | 0.000374 | NM_016553 | 4760543 | 9.00E−06 |
| NM_016237 | 7380288 | 0.000189 | NM_005243 | 4780743 | 0.000257451 |
| NM_199176 | 7380736 | 0.000151 | NM_030811 | 4830435 | 0.00029784 |
| NM_004515 | 7400431 | 0.000268 | NM_012321 | 4830563 | 0.000307859 |
| NM_001152 | 7550537 | 3.79E−05 | NM_006725 | 4850192 | 0.000196735 |
| | | | NM_021809 | 4850438 | 2.80E−05 |
| | | | NM_017755 | 4880195 | 0.000412863 |
| | | | NM_007171 | 4880681 | 0.000449304 |
| | | | NM_014281 | 4900053 | 4.21E−05 |
| | | | NM_003559 | 5090477 | 0.000263019 |
| | | | NM_017415 | 5090739 | 0.000149548 |
| | | | NM_007355 | 5130082 | 0.00046265 |
| | | | NM_000075 | 5270500 | 6.52E−05 |
| | | | NM_022730 | 5310050 | 9.54E−05 |
| | | | NM_001033667 | 5310136 | 0.000229653 |
| | | | NM_001007239 | 5310754 | 0.000403804 |
| | | | NM_003906 | 5390131 | 1.50E−05 |
| | | | NM_006321 | 5390669 | 6.58E−05 |
| | | | NM_152272 | 5550746 | 0.000202311 |
| | | | NM_013270 | 5690037 | 0.000282072 |
| | | | NM_032118 | 5700403 | 0.000211664 |
| | | | NM_031449 | 5720424 | 0.000385745 |
| | | | NM_006082 | 5900156 | 0.000243738 |
| | | | NM_178510 | 5910091 | 0.000338619 |
| | | | NM_170699 | 5960035 | 0.000109508 |
| | | | NM_007255 | 6100220 | 0.000110106 |
| | | | NM_004044 | 6110768 | 1.64E−05 |
| | | | NM_005771 | 6220450 | 0.000188396 |
| | | | NM_152371 | 6250338 | 0.000491338 |
| | | | NM_005968 | 6270021 | 8.58E−05 |
| | | | NM_000074 | 6270128 | 7.83E−06 |
| | | | NM_001039508 | 6280754 | 0.000367935 |
| | | | NM_003755 | 6290431 | 0.000469507 |
| | | | NM_003632 | 6350017 | 0.000305821 |
| | | | NM_033416 | 6380598 | 5.97E−05 |
| | | | NM_001005332 | 6480170 | 0.000147564 |
| | | | NM_025150 | 6480328 | 0.000394396 |
| | | | NM_033554 | 6480500 | 0.000263731 |
| | | | XR_018793 | 6550142 | 0.000155407 |
| | | | NM_024619 | 6590386 | 2.83E−05 |
| | | | NM_001007224 | 6590523 | 0.00018882 |
| | | | NM_015540 | 6860243 | 5.47E−05 |
| | | | NM_004964 | 6940242 | 0.000309192 |
| | | | NM_001033515 | 6960328 | 0.000300225 |
| | | | NM_018384 | 6960746 | 4.44E−05 |
| | | | NM_004776 | 6980070 | 6.06E−05 |
| | | | NM_138576 | 7000133 | 8.72E−05 |
| | | | NM_018380 | 7000224 | 0.000282503 |
| | | | NM_025263 | 7000408 | 0.000238786 |
| | | | NM_022163 | 7040598 | 0.000212169 |
| | | | NM_182476 | 7050543 | 0.000106626 |
| | | | NM_078483 | 7100136 | 0.000145165 |
| | | | NM_004623 | 7100504 | 0.000270702 |
| | | | NM_014165 | 7150601 | 7.64E−05 |
| | | | NM_006901 | 7150634 | 7.48E−05 |
| | | | NM_014976 | 7160296 | 0.000167977 |
| | | | NM_003757 | 7320576 | 0.000480776 |
| | | | NM_016237 | 7380288 | 9.42E−05 |
| | | | NM_001152 | 7550537 | 3.05E−05 |
| | | | NM_017745 | 7560603 | 0.000496595 |

| | |
|---|---|
| List 26 | List 27 |

| AUC | | 1 | | | 0.833 |
|---|---|---|---|---|---|
| Number of | | 86 | | | 48 |
| Transcripts | | | | | |
| Acc.-No. | Probe ID | p-Value | Acc.-No. | Probe ID | p-Value |
| NM_015062 | 20647 | 0.000290214 | XM_932547 | 160121 | 0.000543584 |
| NM_182898 | 160132 | 0.000336575 | NM_002348 | 450037 | 0.000350758 |
| BM981444 | 240653 | 0.000329936 | NM_018715 | 510450 | 0.000153264 |
| NM_005103 | 360343 | 0.000565315 | NM_000155 | 520332 | 0.000379381 |
| NM_002348 | 450037 | 0.000342948 | NM_000896 | 650164 | 4.19E−05 |
| NM_018715 | 510450 | 0.000130559 | CR596519 | 670041 | 0.000321057 |
| NM_000155 | 520332 | 2.35E−05 | XR_015582 | 770452 | 0.00028943 |
| NM_002129 | 610563 | 0.000374121 | AF272739 | 1050128 | 8.83E−05 |
| NM_000896 | 650164 | 0.000149638 | NM_015039 | 1580348 | 0.00031588 |
| CR596519 | 670041 | 0.000147409 | NM_001099786 | 1820598 | 0.00051759 |
| AF272739 | 1050128 | 0.000152295 | XM_936353 | 2030544 | 0.000512868 |
| NM_015292 | 1110215 | 0.000149721 | NM_007115 | 2370524 | 2.66E−05 |
| NM_000878 | 1170307 | 0.00010424 | T03068 | 2450497 | 9.16E−05 |
| NM_000887 | 1240603 | 0.000196853 | NM_031412 | 2630154 | 0.000460849 |
| NM_021105 | 1260228 | 0.000594326 | NM_003528 | 2630451 | 0.000164316 |
| NM_015039 | 1580348 | 0.00011162 | NM_025153 | 2630484 | 5.73E−06 |
| NM_018285 | 1780348 | 0.000315017 | NM_031488 | 3120301 | 0.00035633 |
| NM_001099786 | 1820598 | 0.000486241 | NM_014941 | 3360364 | 0.000256835 |
| NM_004226 | 2100035 | 0.000361256 | NM_139244 | 3460189 | 0.000543541 |
| NM_198196 | 2100333 | 0.000214022 | NM_003137 | 3460674 | 0.000329184 |
| NM_014738 | 2190673 | 0.000170793 | NM_003707 | 3520082 | 0.000548335 |
| XM_935843 | 2260446 | 0.000146988 | NM_213566 | 3520192 | 0.000493729 |
| NM_007115 | 2370524 | 5.38E−06 | NM_005476 | 3610504 | 0.00041975 |
| T03068 | 2450497 | 0.000187261 | XM_930898 | 3830390 | 9.69E−05 |
| NM_003528 | 2630451 | 0.000474784 | XM_940524 | 3940368 | 0.000574144 |
| NM_025153 | 2630484 | 4.79E−05 | X00437 | 3990639 | 0.000502646 |
| NM_001014838 | 2690609 | 0.000385489 | NM_020414 | 4280332 | 0.000499428 |
| NM_001414 | 2760563 | 0.000392459 | NM_003543 | 4730195 | 7.59E−05 |
| NM_031488 | 3120301 | 7.69E−05 | NM_016553 | 4760543 | 0.000243693 |
| NM_017905 | 3130091 | 0.00050347 | NM_014281 | 4900053 | 0.000354862 |
| NM_004555 | 3130291 | 0.000432943 | NM_003559 | 5090477 | 0.000479668 |
| NM_015710 | 3170092 | 0.000556457 | NM_002150 | 5090554 | 0.000386719 |
| NM_014941 | 3360364 | 0.00014666 | NM_013270 | 5690037 | 0.000448829 |
| NM_015288 | 3420735 | 0.000197646 | NM_002808 | 5720497 | 0.000365747 |
| NM_139244 | 3460189 | 0.000564028 | BU733214 | 5860196 | 0.000376113 |
| NM_003137 | 3460674 | 0.00015086 | NM_021052 | 5860400 | 0.000553416 |
| NM_213566 | 3520192 | 0.000105064 | BM974838 | 5870300 | 0.000467433 |
| XM_930898 | 3830390 | 0.000160792 | NM_006082 | 5900156 | 0.000427862 |
| XM_940524 | 3940368 | 0.000419906 | XM_931928 | 6110537 | 0.000483991 |
| X00437 | 3990639 | 0.000234692 | NM_004044 | 6110768 | 0.000593588 |
| NM_022827 | 4120133 | 0.000504567 | NM_000074 | 6270128 | 0.000132118 |
| NM_001779 | 4150161 | 0.000419842 | NM_033416 | 6380598 | 0.000237334 |
| AA868051 | 4150402 | 0.000207276 | NM_018384 | 6960746 | 0.000360717 |
| NM_002756 | 4150632 | 0.000469327 | NM_004776 | 6980070 | 0.000499209 |
| NM_015721 | 4200538 | 0.000584201 | BI915661 | 6980274 | 0.000463447 |
| NM_024600 | 4210647 | 0.000147792 | NM_078483 | 7100136 | 0.000438979 |
| NM_020414 | 4280332 | 0.000117208 | NM_006901 | 7150634 | 0.000283864 |
| NM_015651 | 4540082 | 0.000304396 | NM_001152 | 7550537 | 0.000157677 |
| NM_003543 | 4730195 | 0.000235721 | | | |
| NM_001017404 | 4760364 | 0.000380432 | | | |
| NM_016553 | 4760543 | 4.28E−05 | | | |
| NM_006725 | 4850192 | 0.000317824 | | | |
| NM_016552 | 4850541 | 0.000255862 | | | |
| NM_015239 | 4860132 | 0.00044276 | | | |
| NM_014281 | 4900053 | 9.51E−05 | | | |
| NM_003559 | 5090477 | 0.000560435 | | | |
| AA431917 | 5130154 | 0.000360375 | | | |
| NM_005902 | 5130767 | 0.000571789 | | | |
| XM_941161 | 5270689 | 0.000583152 | | | |
| NM_032312 | 5290289 | 0.000231901 | | | |
| NM_001007239 | 5310754 | 0.000388228 | | | |
| NM_006321 | 5390669 | 0.000575519 | | | |
| NM_013270 | 5690037 | 5.68E−05 | | | |
| NM_032118 | 5700403 | 0.000328534 | | | |
| NM_006082 | 5900156 | 0.000437807 | | | |
| NM_178510 | 5910091 | 0.000458692 | | | |
| NM_003645 | 6110328 | 0.000347124 | | | |
| NM_004044 | 6110768 | 0.000153478 | | | |
| NM_000074 | 6270128 | 0.000174489 | | | |
| NM_002964 | 6280576 | 0.00038563 | | | |
| NM_001039508 | 6280754 | 0.000586113 | | | |
| XM_936128 | 6290561 | 0.000589939 | | | |
| NM_033416 | 6380598 | 0.000424599 | | | |
| AK128384 | 6420541 | 0.000366212 | | | |
| NM_033554 | 6480500 | 0.000208647 | | | |
| NM_024619 | 6590386 | 0.000207786 | | | |
| AA576740 | 6840408 | 0.000454974 | | | |
| NM_018384 | 6960746 | 0.000157737 | | | |
| NM_004776 | 6980070 | 0.000352936 | | | |
| NM_138576 | 7000133 | 0.000570876 | | | |
| NM_182476 | 7050543 | 0.000265389 | | | |
| NM_078483 | 7100136 | 0.000347929 | | | |
| NM_017481 | 7100392 | 0.000469408 | | | |
| NM_006901 | 7150634 | 0.000566389 | | | |
| AW263210 | 7200477 | 0.000483002 | | | |
| NM_001152 | 7550537 | 0.000125031 | | | |

| | |
|---|---|
| List 28 | List 29 |

| AUC | | 0.833 | | | 0.8 |
|---|---|---|---|---|---|
| Number of | | 130 | | | 194 |
| Transcripts | | | | | |
| Acc.-No. | Probe ID | p-Value | Acc.-No. | Probe ID | p-Value |
| NM_001031717 | 10338 | 0.000505 | NM_001031717 | 10338 | 0.000148 |
| NM_015062 | 20647 | 0.000585 | NM_206967 | 20224 | 0.000562 |
| NM_006567 | 130403 | 0.00043 | NM_014669 | 50164 | 0.00043 |
| NM_005804 | 160240 | 0.000598 | NM_052901 | 130113 | 5.90E−05 |
| NM_016292 | 160736 | 0.000413 | NM_006567 | 130403 | 8.09E−07 |
| NM_013378 | 360066 | 0.000592 | NM_021078 | 130451 | 0.000517 |
| NM_015959 | 380315 | 0.0003 | NM_005804 | 160240 | 0.000528 |
| NM_015953 | 380685 | 0.000531 | NM_016292 | 160736 | 0.000312 |
| NM_002348 | 450037 | 0.000157 | NM_013378 | 360066 | 0.000427 |
| NM_021872 | 460754 | 0.000306 | NM_015959 | 380315 | 0.000125 |
| NM_018715 | 510450 | 1.30E−05 | NM_015953 | 380685 | 0.000562 |
| NM_000155 | 520332 | 6.03E−05 | NM_002348 | 450037 | 8.79E−05 |
| NM_002896 | 620722 | 0.000193 | NM_021872 | 460754 | 0.000253 |
| NM_000896 | 650164 | 0.000404 | NM_018715 | 510450 | 1.80E−06 |
| CR596519 | 670041 | 4.42E−05 | AK130294 | 520154 | 0.000475 |
| NM_199337 | 840730 | 0.00058 | NM_000155 | 520332 | 8.15E−05 |
| NM_004927 | 1030692 | 6.28E−05 | NM_024662 | 630768 | 0.000363 |
| AF272739 | 1050128 | 0.000205 | CF619198 | 650014 | 0.000588 |
| NM_015292 | 1110215 | 4.92E−05 | NM_000896 | 650164 | 0.000171 |
| NM_000887 | 1240603 | 0.000262 | CR596519 | 670041 | 6.83E−05 |
| XM_377476 | 1340338 | 0.000496 | NM_015380 | 990273 | 0.000177 |
| NM_001039708 | 1340731 | 0.000528 | NM_004927 | 1030692 | 0.000146 |
| NM_000578 | 1430292 | 0.000314 | AF272739 | 1050128 | 0.000481 |
| NM_016408 | 1440601 | 4.37E−05 | NM_207107 | 1070377 | 0.000204 |
| NM_015039 | 1580348 | 0.000304 | NM_016395 | 1110110 | 0.00054 |
| NM_002405 | 1710286 | 0.000585 | NM_015292 | 1110215 | 3.74E−05 |
| NM_018285 | 1780348 | 0.00013 | BC041984 | 1110358 | 0.000201 |
| NM_001099786 | 1820598 | 3.38E−05 | NM_006720 | 1110575 | 0.000467 |
| XM_936353 | 2030544 | 0.00027 | NM_033141 | 1170139 | 0.000556 |
| NM_198196 | 2100333 | 0.000584 | NM_000887 | 1240603 | 0.000237 |
| NM_001077692 | 2120681 | 0.000383 | NM_006066 | 1300768 | 0.000458 |
| NM_014738 | 2190673 | 0.000294 | XM_377476 | 1340338 | 0.000233 |
| NM_007115 | 2370524 | 1.79E−05 | NM_001039708 | 1340731 | 5.81E−05 |
| BX096685 | 2450343 | 0.000243 | NM_000578 | 1430292 | 0.000305 |
| T03068 | 2450497 | 5.57E−05 | NM_000819 | 1430730 | 0.000332 |
| NM_024798 | 2470341 | 0.000541 | NM_007199 | 1430762 | 0.000558 |
| NM_006031 | 2480082 | 0.000437 | NM_003343 | 1440382 | 0.000126 |
| NM_031412 | 2630154 | 0.000422 | NM_002080 | 1440546 | 0.000371 |
| NM_003528 | 2630451 | 0.000458 | NM_016408 | 1440601 | 0.000195 |
| NM_025153 | 2630484 | 9.60E−05 | NM_001037325 | 1470332 | 0.000411 |
| NM_005937 | 2630719 | 0.000517 | NM_006306 | 1500040 | 0.000292 |
| NM_019111 | 2680370 | 0.000297 | NM_015039 | 1580348 | 0.000479 |
| NM_001014838 | 2690609 | 9.68E−05 | NM_153201 | 1690189 | 0.000387 |
| NM_003707 | 2750408 | 0.000452 | NM_002405 | 1710286 | 0.000338 |
| NM_015135 | 2750521 | 0.00042 | NM_014871 | 1740576 | 9.36E−05 |
| NM_005449 | 2760092 | 0.000386 | NM_018285 | 1780348 | 5.10E−05 |
| NM_001414 | 2760563 | 0.000352 | NM_001099786 | 1820598 | 6.60E−05 |
| NM_005082 | 2850576 | 0.0003 | NM_012155 | 2030450 | 0.000284 |
| NM_031488 | 3120301 | 0.000101 | XM_936353 | 2030544 | 0.000118 |
| NM_006767 | 3140093 | 9.93E−05 | NM_198196 | 2100333 | 0.00025 |
| NM_015710 | 3170092 | 0.000305 | NM_001077692 | 2120681 | 0.000202 |
| NM_014941 | 3360364 | 7.94E−05 | NM_207111 | 2190524 | 0.000122 |
| NM_207311 | 3420343 | 0.000462 | NM_014738 | 2190673 | 4.12E−05 |
| NM_001042600 | 3420630 | 0.000387 | NM_005356 | 2230661 | 0.000461 |
| NM_015288 | 3420735 | 0.000524 | NM_007115 | 2370524 | 4.06E−06 |
| NM_139244 | 3460189 | 0.000483 | NM_016478 | 2370593 | 0.000229 |
| NM_003137 | 3460674 | 0.000106 | BX096685 | 2450343 | 0.000103 |
| NM_003707 | 3520082 | 0.000268 | T03068 | 2450497 | 0.000235 |
| NM_213566 | 3520192 | 0.000257 | NM_006031 | 2480082 | 0.000251 |
| NM_005476 | 3610504 | 5.91E−06 | NM_001076785 | 2480402 | 0.000172 |
| XM_930898 | 3830390 | 0.000483 | NM_024844 | 2510132 | 0.000538 |
| X00437 | 3990639 | 7.90E−05 | NM_031412 | 2630154 | 0.000423 |
| NM_004811 | 4060131 | 0.000337 | NM_020408 | 2630181 | 0.000136 |
| NM_022827 | 4120133 | 0.00028 | NM_003528 | 2630451 | 0.000263 |
| NM_016091 | 4180142 | 0.000453 | NM_025153 | 2630484 | 3.24E−05 |
| XM_068632 | 4200451 | 0.000539 | NM_052853 | 2630524 | 0.000444 |
| NM_015721 | 4200538 | 0.000448 | NM_017955 | 2640278 | 0.000548 |
| NM_024600 | 4210647 | 0.000218 | NM_001025603 | 2640373 | 0.000342 |
| NM_001042631 | 4220138 | 3.86E−05 | NM_005980 | 2640609 | 0.00058 |
| BU608944 | 4220523 | 0.00047 | NM_019111 | 2680370 | 0.000448 |
| NM_020414 | 4280332 | 0.000117 | NM_213636 | 2680682 | 0.00012 |
| NM_015651 | 4540082 | 0.000122 | NM_001014838 | 2690609 | 0.000266 |
| NM_015433 | 4540301 | 0.000501 | NM_003059 | 2710397 | 0.000429 |
| NM_006445 | 4590082 | 0.000457 | NM_001854 | 2750070 | 0.000216 |
| NM_001024667 | 4590646 | 0.000137 | NM_018233 | 2750242 | 0.000414 |
| NM_003543 | 4730195 | 0.000136 | NM_003707 | 2750408 | 0.00047 |
| CK300859 | 4730577 | 0.000288 | NM_015135 | 2750521 | 1.66E−05 |
| NM_016553 | 4760543 | 3.10E−05 | NM_005449 | 2760092 | 0.000595 |
| NM_005243 | 4780743 | 0.000104 | NM_001414 | 2760563 | 0.000336 |
| NM_006725 | 4850192 | 0.000138 | NM_007357 | 2810767 | 0.000567 |
| NM_014281 | 4900053 | 4.57E−05 | NM_005082 | 2850576 | 0.00015 |
| NM_007047 | 4920577 | 0.000318 | NM_001384 | 2900524 | 0.000146 |
| NM_007355 | 5130082 | 0.000293 | NM_031488 | 3120301 | 5.41E−05 |
| NM_000075 | 5270500 | 0.000307 | NM_020750 | 3130711 | 0.000215 |
| NM_022730 | 5310050 | 0.000512 | NM_015511 | 3140022 | 0.000549 |
| NM_001007239 | 5310754 | 0.000134 | NM_006767 | 3140093 | 0.000376 |
| NM_003906 | 5390131 | 0.000193 | NM_015710 | 3170092 | 0.000504 |
| NM_152272 | 5550746 | 0.000311 | NM_016089 | 3170468 | 0.000221 |
| CR738137 | 5570632 | 0.000422 | NM_152735 | 3290019 | 0.000145 |
| NM_013270 | 5690037 | 0.000207 | NM_014941 | 3360364 | 2.76E−05 |
| NM_002139 | 5690673 | 0.00033 | NM_005698 | 3370687 | 0.000334 |
| NM_032118 | 5700403 | 0.000303 | NM_015002 | 3400372 | 0.000175 |
| NM_001628 | 5890327 | 0.000232 | AK091091 | 3420086 | 0.000508 |
| NM_006082 | 5900156 | 0.000463 | NM_207311 | 3420343 | 0.00019 |
| NM_178510 | 5910091 | 3.75E−05 | NM_015288 | 3420735 | 0.000328 |
| NM_170699 | 5960035 | 0.000309 | NM_012110 | 3440431 | 0.000142 |
| NM_014230 | 6020402 | 0.000423 | NM_020933 | 3440433 | 0.000555 |
| NM_007255 | 6100220 | 0.000328 | NM_003137 | 3460674 | 0.000115 |
| NM_144666 | 6110142 | 0.000278 | NM_003707 | 3520082 | 3.93E−05 |
| XM_931928 | 6110537 | 0.000164 | NM_213566 | 3520192 | 3.69E−05 |
| NM_004044 | 6110768 | 0.00024 | NM_005476 | 3610504 | 2.07E−05 |
| NM_005968 | 6270021 | 5.91E−05 | NM_002883 | 3710189 | 0.00034 |
| NM_000074 | 6270128 | 2.40E−05 | NM_018129 | 3780220 | 0.00044 |
| NM_015044 | 6270364 | 0.000463 | NM_023080 | 3830278 | 0.000548 |
| NM_001039508 | 6280754 | 0.000111 | XM_930898 | 3830390 | 0.000366 |
| NM_003755 | 6290431 | 0.000599 | NM_004092 | 3840022 | 0.000123 |
| XM_936128 | 6290561 | 0.000182 | NM_025152 | 3840131 | 0.000443 |
| NM_033416 | 6380598 | 0.000216 | NM_003496 | 3850286 | 0.000181 |
| NM_001005332 | 6480170 | 0.000377 | CF887308 | 3940020 | 0.000515 |
| NM_025150 | 6480328 | 0.000272 | XM_940524 | 3940368 | 0.000377 |
| NM_033554 | 6480500 | 0.00015 | NM_012111 | 3990192 | 0.000308 |
| XR_018793 | 6550142 | 0.000362 | XM_496059 | 3990465 | 0.000231 |
| NM_024619 | 6590386 | 4.64E−05 | X00437 | 3990639 | 6.35E−05 |
| NM_015540 | 6860243 | 0.00038 | BM668555 | 4050270 | 0.000525 |
| NM_004964 | 6940242 | 0.000349 | NM_015054 | 4060056 | 0.000332 |
| NM_018384 | 6960746 | 9.79E−05 | NM_004811 | 4060131 | 0.000261 |
| NM_004776 | 6980070 | 0.000502 | NM_145298 | 4070132 | 0.000442 |
| BI915661 | 6980274 | 0.000496 | NM_015721 | 4200538 | 8.54E−05 |
| NM_138576 | 7000133 | 0.000541 | NM_024600 | 4210647 | 4.75E−05 |
| NM_078483 | 7100136 | 0.000449 | NM_001042631 | 4220138 | 4.77E−05 |
| NM_006429 | 7150017 | 0.000585 | NM_020414 | 4280332 | 8.56E−05 |
| NM_014165 | 7150601 | 0.00013 | NM_015651 | 4540082 | 0.000102 |
| NM_006901 | 7150634 | 6.17E−05 | NM_015433 | 4540301 | 1.61E−05 |
| NM_014976 | 7160296 | 0.000121 | NM_025228 | 4640528 | 0.000324 |
| NM_003757 | 7320576 | 0.000262 | NM_003543 | 4730195 | 3.83E−05 |
| NM_007167 | 7380274 | 0.000374 | CK300859 | 4730577 | 0.000174 |
| NM_016237 | 7380288 | 0.000189 | NM_016553 | 4760543 | 9.00E−06 |
| NM_199176 | 7380736 | 0.000151 | NM_005243 | 4780743 | 0.000257 |
| NM_004515 | 7400431 | 0.000268 | NM_030811 | 4830435 | 0.000298 |
| NM_001152 | 7550537 | 3.79E−05 | NM_012321 | 4830563 | 0.000308 |
| | | | NM_006725 | 4850192 | 0.000197 |
| | | | NM_021809 | 4850438 | 2.80E−05 |
| | | | NM_017755 | 4880195 | 0.000413 |
| | | | NM_007171 | 4880681 | 0.000449 |
| | | | NM_014281 | 4900053 | 4.21E−05 |
| | | | NM_003559 | 5090477 | 0.000263 |
| | | | NM_017415 | 5090739 | 0.00015 |
| | | | NM_007355 | 5130082 | 0.000463 |
| | | | NM_000075 | 5270500 | 6.52E−05 |
| | | | NM_022730 | 5310050 | 9.54E−05 |
| | | | NM_001033667 | 5310136 | 0.00023 |
| | | | NM_001007239 | 5310754 | 0.000404 |
| | | | NM_003906 | 5390131 | 1.50E−05 |
| | | | NM_006321 | 5390669 | 6.58E−05 |
| | | | NM_152272 | 5550746 | 0.000202 |
| | | | CR738137 | 5570632 | 0.000598 |
| | | | NM_013270 | 5690037 | 0.000282 |
| | | | NM_032118 | 5700403 | 0.000212 |
| | | | NM_031449 | 5720424 | 0.000386 |
| | | | NM_006082 | 5900156 | 0.000244 |
| | | | NM_178510 | 5910091 | 0.000339 |
| | | | XM_001131964 | 5910343 | 0.000553 |
| | | | NM_170699 | 5960035 | 0.00011 |
| | | | NM_007255 | 6100220 | 0.00011 |
| | | | NM_004044 | 6110768 | 1.64E−05 |
| | | | NM_005771 | 6220450 | 0.000188 |
| | | | NM_152371 | 6250338 | 0.000491 |
| | | | NM_005968 | 6270021 | 8.58E−05 |
| | | | NM_000074 | 6270128 | 7.83E−06 |
| | | | NM_001039508 | 6280754 | 0.000368 |
| | | | NM_003755 | 6290431 | 0.00047 |
| | | | NM_003632 | 6350017 | 0.000306 |
| | | | NM_001032363 | 6380358 | 0.000561 |
| | | | NM_033416 | 6380598 | 5.97E−05 |
| | | | NM_001040107 | 6400563 | 0.00054 |
| | | | NM_001005332 | 6480170 | 0.000148 |
| | | | NM_025150 | 6480328 | 0.000394 |
| | | | NM_033554 | 6480500 | 0.000264 |
| | | | XR_018793 | 6550142 | 0.000155 |
| | | | NM_024619 | 6590386 | 2.83E−05 |
| | | | NM_001007224 | 6590523 | 0.000189 |
| | | | NM_176880 | 6650541 | 0.000501 |
| | | | NM_015540 | 6860243 | 5.47E−05 |
| | | | NM_004964 | 6940242 | 0.000309 |
| | | | NM_001033515 | 6960328 | 0.0003 |
| | | | NM_018384 | 6960746 | 4.44E−05 |
| | | | NM_004776 | 6980070 | 6.06E−05 |
| | | | BI915661 | 6980274 | 0.000506 |
| | | | NM_138576 | 7000133 | 8.72E−05 |
| | | | NM_018380 | 7000224 | 0.000283 |
| | | | NM_025263 | 7000408 | 0.000239 |
| | | | NM_022163 | 7040598 | 0.000212 |
| | | | NM_182476 | 7050543 | 0.000107 |
| | | | NM_078483 | 7100136 | 0.000145 |
| | | | NM_004623 | 7100504 | 0.000271 |
| | | | NM_006429 | 7150017 | 0.000509 |
| | | | NM_014165 | 7150601 | 7.64E−05 |
| | | | NM_006901 | 7150634 | 7.48E−05 |
| | | | NM_014976 | 7160296 | 0.000168 |
| | | | NM_003757 | 7320576 | 0.000481 |
| | | | NM_005922 | 7320594 | 0.000524 |
| | | | NM_016237 | 7380288 | 9.42E−05 |
| | | | NM_001152 | 7550537 | 3.05E−05 |
| | | | NM_017745 | 7560603 | 0.000497 |

| | |
|---|---|
| List 30 | List 31 |

| AUC | | 1 | | | 0.833 |
|---|---|---|---|---|---|
| Number of | | 99 | | | 55 |
| Transcripts | | | | | |
| Acc.-No. | Probe ID | p-Value | Acc.-No. | Probe ID | p-Value |
| NM_015062 | 20647 | 0.00029 | XM_932547 | 160121 | 0.000544 |
| NM_182898 | 160132 | 0.000337 | NM_002348 | 450037 | 0.000351 |
| BM981444 | 240653 | 0.00033 | NM_018715 | 510450 | 0.000153 |
| NM_005103 | 360343 | 0.000565 | NM_000155 | 520332 | 0.000379 |
| NM_002348 | 450037 | 0.000343 | NM_000896 | 650164 | 4.19E−05 |
| NM_021872 | 460754 | 0.0007 | CR596519 | 670041 | 0.000321 |
| NM_018715 | 510450 | 0.000131 | XR_015582 | 770452 | 0.000289 |
| NM_000155 | 520332 | 2.35E−05 | AF272739 | 1050128 | 8.83E−05 |
| NM_002129 | 610563 | 0.000374 | NM_000887 | 1240603 | 0.000605 |
| NM_000896 | 650164 | 0.00015 | NM_000578 | 1430292 | 0.00066 |
| CR596519 | 670041 | 0.000147 | NM_015039 | 1580348 | 0.000316 |
| AF272739 | 1050128 | 0.000152 | NM_001099786 | 1820598 | 0.000518 |
| NM_015292 | 1110215 | 0.00015 | XM_936353 | 2030544 | 0.000513 |
| NM_000878 | 1170307 | 0.000104 | CK299581 | 2120356 | 0.000628 |
| NM_000887 | 1240603 | 0.000197 | XM_935843 | 2260446 | 0.000632 |
| NM_021105 | 1260228 | 0.000594 | NM_007115 | 2370524 | 2.66E−05 |
| NM_015039 | 1580348 | 0.000112 | T03068 | 2450497 | 9.16E−05 |
| NM_002405 | 1710286 | 0.000679 | NM_031412 | 2630154 | 0.000461 |
| NM_018285 | 1780348 | 0.000315 | NM_003528 | 2630451 | 0.000164 |
| NM_001099786 | 1820598 | 0.000486 | NM_025153 | 2630484 | 5.73E−06 |
| NM_004226 | 2100035 | 0.000361 | NM_031488 | 3120301 | 0.000356 |
| NM_198196 | 2100333 | 0.000214 | NM_014941 | 3360364 | 0.000257 |
| NM_014738 | 2190673 | 0.000171 | NM_139244 | 3460189 | 0.000544 |
| XM_935843 | 2260446 | 0.000147 | NM_003137 | 3460674 | 0.000329 |
| NM_007115 | 2370524 | 5.38E−06 | NM_003707 | 3520082 | 0.000548 |
| T03068 | 2450497 | 0.000187 | NM_213566 | 3520192 | 0.000494 |
| NM_003528 | 2630451 | 0.000475 | NM_005476 | 3610504 | 0.00042 |
| NM_025153 | 2630484 | 4.79E−05 | NM_000648 | 3800270 | 0.000658 |
| NM_001014838 | 2690609 | 0.000385 | XM_930898 | 3830390 | 9.69E−05 |
| NM_003059 | 2710397 | 0.000618 | XM_940524 | 3940368 | 0.000574 |
| NM_001414 | 2760563 | 0.000392 | X00437 | 3990639 | 0.000503 |
| NM_031488 | 3120301 | 7.69E−05 | NM_020414 | 4280332 | 0.000499 |
| NM_017905 | 3130091 | 0.000503 | NM_003543 | 4730195 | 7.59E−05 |
| NM_004555 | 3130291 | 0.000433 | NM_016553 | 4760543 | 0.000244 |
| NM_015710 | 3170092 | 0.000556 | NM_016552 | 4850541 | 0.00067 |
| NM_014941 | 3360364 | 0.000147 | NM_014281 | 4900053 | 0.000355 |
| NM_005698 | 3370687 | 0.000692 | NM_003559 | 5090477 | 0.00048 |
| NM_015288 | 3420735 | 0.000198 | NM_002150 | 5090554 | 0.000387 |
| NM_139244 | 3460189 | 0.000564 | CD243631 | 5270450 | 0.000608 |
| NM_024430 | 3460523 | 0.000681 | NM_013270 | 5690037 | 0.000449 |
| NM_003137 | 3460674 | 0.000151 | NM_002808 | 5720497 | 0.000366 |
| NM_213566 | 3520192 | 0.000105 | BU733214 | 5860196 | 0.000376 |
| XM_930898 | 3830390 | 0.000161 | NM_021052 | 5860400 | 0.000553 |
| NM_004092 | 3840022 | 0.000609 | BM974838 | 5870300 | 0.000467 |
| XM_940524 | 3940368 | 0.00042 | NM_006082 | 5900156 | 0.000428 |
| XM_496059 | 3990465 | 0.000615 | XM_931928 | 6110537 | 0.000484 |
| X00437 | 3990639 | 0.000235 | NM_004044 | 6110768 | 0.000594 |
| NM_022827 | 4120133 | 0.000505 | NM_000074 | 6270128 | 0.000132 |
| NM_001779 | 4150161 | 0.00042 | NM_033416 | 6380598 | 0.000237 |
| AA868051 | 4150402 | 0.000207 | NM_018384 | 6960746 | 0.000361 |
| NM_002756 | 4150632 | 0.000469 | NM_004776 | 6980070 | 0.000499 |
| NM_015721 | 4200538 | 0.000584 | BI915661 | 6980274 | 0.000463 |
| NM_024600 | 4210647 | 0.000148 | NM_078483 | 7100136 | 0.000439 |
| NM_020414 | 4280332 | 0.000117 | NM_006901 | 7150634 | 0.000284 |
| NM_015651 | 4540082 | 0.000304 | NM_001152 | 7550537 | 0.000158 |
| AK055286 | 4640369 | 0.0007 | | | |
| NM_003543 | 4730195 | 0.000236 | | | |
| NM_001017404 | 4760364 | 0.00038 | | | |
| NM_016553 | 4760543 | 4.28E−05 | | | |
| NM_006725 | 4850192 | 0.000318 | | | |
| NM_016552 | 4850541 | 0.000256 | | | |
| NM_015239 | 4860132 | 0.000443 | | | |
| NM_014281 | 4900053 | 9.51E−05 | | | |
| NM_003559 | 5090477 | 0.00056 | | | |
| AA431917 | 5130154 | 0.00036 | | | |
| NM_005902 | 5130767 | 0.000572 | | | |
| XM_941161 | 5270689 | 0.000583 | | | |
| NM_032312 | 5290289 | 0.000232 | | | |
| NM_001007239 | 5310754 | 0.000388 | | | |
| NM_006321 | 5390669 | 0.000576 | | | |
| NM_013270 | 5690037 | 5.68E−05 | | | |
| NM_032118 | 5700403 | 0.000329 | | | |
| NM_006082 | 5900156 | 0.000438 | | | |
| NM_178510 | 5910091 | 0.000459 | | | |
| NM_003645 | 6110328 | 0.000347 | | | |
| NM_004044 | 6110768 | 0.000153 | | | |
| NM_005968 | 6270021 | 0.000656 | | | |
| NM_000074 | 6270128 | 0.000174 | | | |
| NM_002964 | 6280576 | 0.000386 | | | |
| NM_001039508 | 6280754 | 0.000586 | | | |
| XM_936128 | 6290561 | 0.00059 | | | |
| NM_033416 | 6380598 | 0.000425 | | | |
| NM_001040107 | 6400563 | 0.000633 | | | |
| AK128384 | 6420541 | 0.000366 | | | |
| NM_033554 | 6480500 | 0.000209 | | | |
| NM_024619 | 6590386 | 0.000208 | | | |
| AA576740 | 6840408 | 0.000455 | | | |
| NM_018384 | 6960746 | 0.000158 | | | |
| NM_004776 | 6980070 | 0.000353 | | | |
| NM_138576 | 7000133 | 0.000571 | | | |
| NM_025263 | 7000408 | 0.000678 | | | |
| NM_182476 | 7050543 | 0.000265 | | | |
| NM_078483 | 7100136 | 0.000348 | | | |
| NM_017481 | 7100392 | 0.000469 | | | |
| NM_006901 | 7150634 | 0.000566 | | | |
| NM_014976 | 7160296 | 0.000616 | | | |
| AW263210 | 7200477 | 0.000483 | | | |
| NM_016237 | 7380288 | 0.000652 | | | |
| NM_001152 | 7550537 | 0.000125 | | | |
| | | | | | 9.00E−05 |

| | |
|---|---|
| List 32 | List 33 |

| AUC | | 0.833 | | | 0.80 |
|---|---|---|---|---|---|
| Number of | | 145 | | | 83 |
| Transcripts | | | | | |
| Acc.-No. | Probe ID | p-Value | Acc.-No. | Probe ID | p-Value |
| NM_001031717 | 10338 | 0.000505486 | NM_182898 | 160132 | 0.000251 |
| NM_015062 | 20647 | 0.000584743 | NM_002348 | 450037 | 0.000325 |
| NM_006567 | 130403 | 0.000429526 | NM_194260 | 460273 | 0.0003 |
| NM_005804 | 160240 | 0.0005983 | NM_018715 | 510450 | 9.61E−05 |
| NM_016292 | 160736 | 0.000413213 | NM_000155 | 520332 | 0.000228 |
| BM981444 | 240653 | 0.000605125 | NM_002129 | 610563 | 0.000746 |
| NM_013378 | 360066 | 0.000592211 | NM_000896 | 650164 | 0.000219 |
| NM_015959 | 380315 | 0.000300236 | CR596519 | 670041 | 0.000556 |
| NM_015953 | 380685 | 0.000530757 | AF272739 | 1050128 | 0.000586 |
| NM_002348 | 450037 | 0.000156623 | NM_015292 | 1110215 | 0.000501 |
| NM_021872 | 460754 | 0.000306394 | NM_000887 | 1240603 | 0.000255 |
| NM_018715 | 510450 | 1.30E−05 | NM_016286 | 1410369 | 0.00052 |
| NM_000155 | 520332 | 6.03E−05 | NM_000578 | 1430292 | 0.000584 |
| NM_002896 | 620722 | 0.000193392 | NM_015039 | 1580348 | 0.000158 |
| NM_000896 | 650164 | 0.000404198 | BX101820 | 1690504 | 0.000107 |
| CR596519 | 670041 | 4.42E−05 | NM_002405 | 1710286 | 0.000137 |
| NM_199337 | 840730 | 0.000580276 | NM_018285 | 1780348 | 0.000257 |
| NM_004927 | 1030692 | 6.28E−05 | NM_001099786 | 1820598 | 0.000418 |
| AF272739 | 1050128 | 0.000205321 | NM_012395 | 2000390 | 0.000425 |
| NM_015292 | 1110215 | 4.92E−05 | NM_017758 | 2100221 | 0.000121 |
| NM_006720 | 1110575 | 0.000622656 | CK299581 | 2120356 | 0.000303 |
| NM_000887 | 1240603 | 0.000261591 | NM_014738 | 2190673 | 0.000185 |
| XM_377476 | 1340338 | 0.000495677 | XM_935843 | 2260446 | 0.000153 |
| NM_001039708 | 1340731 | 0.000528354 | NM_007115 | 2370524 | 3.72E−06 |
| NM_004716 | 1400270 | 0.000620856 | BQ372445 | 2370681 | 0.000584 |
| NM_000578 | 1430292 | 0.000314186 | T03068 | 2450497 | 0.000721 |
| NM_002080 | 1440546 | 0.000602009 | NM_025153 | 2630484 | 0.000145 |
| NM_016408 | 1440601 | 4.37E−05 | NM_001014838 | 2690609 | 0.000645 |
| NM_015039 | 1580348 | 0.000303914 | NM_001854 | 2750070 | 0.000658 |
| NM_002405 | 1710286 | 0.000585056 | NM_031488 | 3120301 | 0.000158 |
| NM_014871 | 1740576 | 0.000605505 | NM_205548 | 3140088 | 0.000507 |
| NM_018285 | 1780348 | 0.000129917 | CB046255 | 3310075 | 0.000367 |
| NM_001099786 | 1820598 | 3.38E−05 | BI260057 | 3310341 | 0.000518 |
| XM_936353 | 2030544 | 0.000270398 | NM_014941 | 3360364 | 4.61E−05 |
| NM_198196 | 2100333 | 0.00058383 | NM_005698 | 3370687 | 0.000458 |
| NM_001077692 | 2120681 | 0.000383187 | NM_003137 | 3460674 | 0.00014 |
| NM_014738 | 2190673 | 0.000294422 | NM_005476 | 3610504 | 0.000258 |
| NM_007115 | 2370524 | 1.79E−05 | NM_004092 | 3840022 | 0.000495 |
| BX096685 | 2450343 | 0.000242985 | X00437 | 3990639 | 0.000336 |
| T03068 | 2450497 | 5.57E−05 | AA868051 | 4150402 | 0.000262 |
| NM_024798 | 2470341 | 0.000540773 | AI863525 | 4230520 | 0.000274 |
| NM_006031 | 2480082 | 0.0004368 | NM_020414 | 4280332 | 0.000423 |
| NM_031412 | 2630154 | 0.000422125 | NM_015651 | 4540082 | 0.000308 |
| NM_003528 | 2630451 | 0.000458484 | NM_015433 | 4540301 | 0.000651 |
| NM_025153 | 2630484 | 9.60E−05 | NM_003543 | 4730195 | 0.000341 |
| NM_005937 | 2630719 | 0.000516582 | CK300859 | 4730577 | 0.000106 |
| NM_019111 | 2680370 | 0.000296926 | NM_016553 | 4760543 | 2.55E−05 |
| NM_001014838 | 2690609 | 9.68E−05 | NM_016552 | 4850541 | 0.000257 |
| NM_003707 | 2750408 | 0.000451536 | BX096603 | 4880373 | 0.000369 |
| NM_015135 | 2750521 | 0.000420473 | NM_014281 | 4900053 | 1.89E−05 |
| NM_005449 | 2760092 | 0.00038612 | NM_015702 | 5090204 | 0.000414 |
| NM_001414 | 2760563 | 0.000352149 | NM_003559 | 5090477 | 0.00074 |
| NM_005082 | 2850576 | 0.000299803 | NM_032312 | 5290289 | 0.000641 |
| NM_001384 | 2900524 | 0.000694072 | NM_003906 | 5390131 | 0.000496 |
| NM_031488 | 3120301 | 0.000100839 | NM_013270 | 5690037 | 0.000251 |
| NM_006767 | 3140093 | 9.93E−05 | NM_032118 | 5700403 | 0.000798 |
| NM_015710 | 3170092 | 0.000305455 | BU733214 | 5860196 | 0.000367 |
| NM_014941 | 3360364 | 7.94E−05 | NM_006082 | 5900156 | 0.000222 |
| NM_020808 | 3370605 | 0.000651398 | NM_170699 | 5960035 | 0.000233 |
| NM_207311 | 3420343 | 0.000462046 | NM_007255 | 6100220 | 0.00078 |
| NM_001042600 | 3420630 | 0.000386751 | NM_004044 | 6110768 | 0.000385 |
| NM_015288 | 3420735 | 0.000524285 | NM_000074 | 6270128 | 8.15E−05 |
| NM_139244 | 3460189 | 0.000482683 | AL157484 | 6280682 | 0.000692 |
| NM_003137 | 3460674 | 0.000105671 | NM_033416 | 6380598 | 0.000496 |
| NM_003707 | 3520082 | 0.000268436 | NM_001040107 | 6400563 | 0.000184 |
| NM_213566 | 3520192 | 0.000256844 | NM_024619 | 6590386 | 0.000143 |
| NM_005476 | 3610504 | 5.91E−06 | BX110808 | 6770491 | 0.000657 |
| XM_930898 | 3830390 | 0.000482507 | NM_004964 | 6940242 | 0.000592 |
| X00437 | 3990639 | 7.90E−05 | NM_018384 | 6960746 | 0.000337 |
| NM_015054 | 4060056 | 0.00066021 | NM_004776 | 6980070 | 0.000193 |
| NM_004811 | 4060131 | 0.000336594 | NM_178839 | 6980609 | 0.000248 |
| NM_022827 | 4120133 | 0.000279972 | NM_078483 | 7100136 | 0.000162 |
| NM_016091 | 4180142 | 0.000452506 | NM_006429 | 7150017 | 0.000353 |
| XM_068632 | 4200451 | 0.000538946 | NM_006901 | 7150634 | 0.000569 |
| NM_015721 | 4200538 | 0.000448259 | NM_001008269 | 7320100 | 0.000502 |
| NM_024600 | 4210647 | 0.000218332 | NM_002566 | 7330487 | 0.000769 |
| NM_001042631 | 4220138 | 3.86E−05 | NM_016237 | 7380288 | 0.000729 |
| BU608944 | 4220523 | 0.000470093 | NM_001152 | 7550537 | 0.000167 |
| NM_020414 | 4280332 | 0.000116602 | | | |
| NM_015651 | 4540082 | 0.000122445 | | | |
| NM_015433 | 4540301 | 0.000501202 | | | |
| NM_006445 | 4590082 | 0.0004573 | | | |
| NM_001024667 | 4590646 | 0.000136649 | | | |
| NM_025228 | 4640528 | 0.000617046 | | | |
| NM_003543 | 4730195 | 0.000135573 | | | |
| CK300859 | 4730577 | 0.000287829 | | | |
| NM_016553 | 4760543 | 3.10E−05 | | | |
| NM_005243 | 4780743 | 0.000104109 | | | |
| NM_006725 | 4850192 | 0.000137581 | | | |
| NM_014281 | 4900053 | 4.57E−05 | | | |
| NM_007047 | 4920577 | 0.000317837 | | | |
| NM_007355 | 5130082 | 0.000293167 | | | |
| NM_000075 | 5270500 | 0.000307483 | | | |
| NM_022730 | 5310050 | 0.000511636 | | | |
| NM_001007239 | 5310754 | 0.000134498 | | | |
| NM_003906 | 5390131 | 0.000192748 | | | |
| NM_152272 | 5550746 | 0.0003108 | | | |
| CR738137 | 5570632 | 0.00042202 | | | |
| NM_013270 | 5690037 | 0.000207129 | | | |
| NM_002139 | 5690673 | 0.000329755 | | | |
| NM_032118 | 5700403 | 0.00030255 | | | |
| NM_173791 | 5720398 | 0.000646611 | | | |
| NM_001628 | 5890327 | 0.000232439 | | | |
| NM_006082 | 5900156 | 0.000462816 | | | |
| NM_178510 | 5910091 | 3.75E−05 | | | |
| NM_170699 | 5960035 | 0.000308613 | | | |
| NM_014230 | 6020402 | 0.000422804 | | | |
| NM_007255 | 6100220 | 0.000327645 | | | |
| NM_144666 | 6110142 | 0.000277742 | | | |
| XM_931928 | 6110537 | 0.00016377 | | | |
| NM_004044 | 6110768 | 0.000239957 | | | |
| NM_017879 | 6250047 | 0.000689194 | | | |
| NM_005968 | 6270021 | 5.91E−05 | | | |
| NM_000074 | 6270128 | 2.40E−05 | | | |
| NM_015044 | 6270364 | 0.000462891 | | | |
| NM_001039508 | 6280754 | 0.000111495 | | | |
| NM_003755 | 6290431 | 0.000599445 | | | |
| XM_936128 | 6290561 | 0.000181547 | | | |
| NM_033301 | 6380148 | 0.000610938 | | | |
| NM_033416 | 6380598 | 0.000216129 | | | |
| NM_001005332 | 6480170 | 0.000377427 | | | |
| NM_025150 | 6480328 | 0.000271729 | | | |
| NM_033554 | 6480500 | 0.000149999 | | | |
| XR_018793 | 6550142 | 0.000362187 | | | |
| NM_024619 | 6590386 | 4.64E−05 | | | |
| NM_001007224 | 6590523 | 0.00067376 | | | |
| CA424950 | 6650576 | 0.000636036 | | | |
| NM_015540 | 6860243 | 0.000380264 | | | |
| NM_004964 | 6940242 | 0.000348957 | | | |
| NM_018384 | 6960746 | 9.79E−05 | | | |
| NM_004776 | 6980070 | 0.000501614 | | | |
| BI915661 | 6980274 | 0.000496142 | | | |
| NM_138576 | 7000133 | 0.00054059 | | | |
| NM_078483 | 7100136 | 0.000448782 | | | |
| NM_006429 | 7150017 | 0.000585091 | | | |
| NM_014165 | 7150601 | 0.00013018 | | | |
| NM_006901 | 7150634 | 6.17E−05 | | | |
| NM_014976 | 7160296 | 0.000120818 | | | |
| NM_003757 | 7320576 | 0.00026195 | | | |
| NM_007167 | 7380274 | 0.000373897 | | | |
| NM_016237 | 7380288 | 0.000188682 | | | |
| NM_199176 | 7380736 | 0.000151001 | | | |
| NM_004515 | 7400431 | 0.000268027 | | | |
| NM_001037161 | 7510224 | 0.000691687 | | | |
| NM_001152 | 7550537 | 3.79E−05 | | | |

| | |
|---|---|
| List 34 | List 35 |

| AUC | | 0.83 | | | 0.87 |
|---|---|---|---|---|---|
| Number of | | 160 | | | 88 |
| Transcripts | | | | | |
| Acc.-No. | Probe ID | p-Value | Acc.-No. | Probe ID | p-Value |
| NM_001031717 | 10338 | | NM_182898 | 160132 | 0.000251 |
| NM_015062 | 20647 | | NM_002348 | 450037 | 0.000325 |
| NM_006567 | 130403 | | NM_194260 | 460273 | 0.0003 |
| NM_182898 | 160132 | | NM_018715 | 510450 | 9.61E−05 |
| NM_005804 | 160240 | | NM_000155 | 520332 | 0.000228 |
| NM_016292 | 160736 | | NM_002129 | 610563 | 0.000746 |
| BM981444 | 240653 | | NM_000896 | 650164 | 0.000219 |
| NM_013378 | 360066 | | CR596519 | 670041 | 0.000556 |
| NM_015959 | 380315 | | AF272739 | 1050128 | 0.000586 |
| NM_015953 | 380685 | | NM_015292 | 1110215 | 0.000501 |
| NM_002348 | 450037 | | NM_000887 | 1240603 | 0.000255 |
| NM_021872 | 460754 | | NM_021105 | 1260228 | 0.000814 |
| NM_018715 | 510450 | | NM_016286 | 1410369 | 0.00052 |
| NM_000155 | 520332 | | NM_000578 | 1430292 | 0.000584 |
| NM_002896 | 620722 | | NM_001037325 | 1470332 | 0.000876 |
| NM_000896 | 650164 | | NM_015039 | 1580348 | 0.000158 |
| CR596519 | 670041 | | BX101820 | 1690504 | 0.000107 |
| NM_199337 | 840730 | | NM_002405 | 1710286 | 0.000137 |
| NM_004927 | 1030692 | | NM_018285 | 1780348 | 0.000257 |
| AF272739 | 1050128 | | NM_001099786 | 1820598 | 0.000418 |
| NM_015292 | 1110215 | | NM_012395 | 2000390 | 0.000425 |
| NM_006720 | 1110575 | | NM_004226 | 2100035 | 0.000859 |
| NM_000887 | 1240603 | | NM_017758 | 2100221 | 0.000121 |
| NM_021105 | 1260228 | | CK299581 | 2120356 | 0.000303 |
| NM_006066 | 1300768 | | NM_014738 | 2190673 | 0.000185 |
| XM_377476 | 1340338 | | XM_935843 | 2260446 | 0.000153 |
| NM_001039708 | 1340731 | | NM_007115 | 2370524 | 3.72E−06 |
| NM_004716 | 1400270 | | BQ372445 | 2370681 | 0.000584 |
| NM_000578 | 1430292 | | T03068 | 2450497 | 0.000721 |
| NM_002080 | 1440546 | | NM_025153 | 2630484 | 0.000145 |
| NM_016408 | 1440601 | | NM_001014838 | 2690609 | 0.000645 |
| NM_015039 | 1580348 | | NM_001854 | 2750070 | 0.000658 |
| NM_006424 | 1710189 | | NM_003707 | 2750408 | 0.00087 |
| NM_002405 | 1710286 | | NM_031488 | 3120301 | 0.000158 |
| NM_014871 | 1740576 | | NM_205548 | 3140088 | 0.000507 |
| NM_018285 | 1780348 | | CB046255 | 3310075 | 0.000367 |
| NM_001099786 | 1820598 | | BI260057 | 3310341 | 0.000518 |
| XM_936353 | 2030544 | | NM_014941 | 3360364 | 4.61E−05 |
| NM_198196 | 2100333 | | NM_005698 | 3370687 | 0.000458 |
| NM_001077692 | 2120681 | | NM_003137 | 3460674 | 0.00014 |
| NM_014738 | 2190673 | | NM_213566 | 3520192 | 0.000899 |
| NM_007115 | 2370524 | | NM_005476 | 3610504 | 0.000258 |
| BX096685 | 2450343 | | NM_004092 | 3840022 | 0.000495 |
| T03068 | 2450497 | | X00437 | 3990639 | 0.000336 |
| NM_024798 | 2470341 | | AA868051 | 4150402 | 0.000262 |
| NM_006031 | 2480082 | | NM_001042631 | 4220138 | 0.000866 |
| NM_031412 | 2630154 | | AI863525 | 4230520 | 0.000274 |
| NM_003528 | 2630451 | | NM_183384 | 4280047 | 0.000834 |
| NM_025153 | 2630484 | | NM_020414 | 4280332 | 0.000423 |
| NM_005937 | 2630719 | | NM_015651 | 4540082 | 0.000308 |
| NM_019111 | 2680370 | | NM_015433 | 4540301 | 0.000651 |
| NM_001014838 | 2690609 | | NM_003543 | 4730195 | 0.000341 |
| NM_003707 | 2750408 | | CK300859 | 4730577 | 0.000106 |
| NM_015135 | 2750521 | | NM_016553 | 4760543 | 2.55E−05 |
| NM_005449 | 2760092 | | NM_016552 | 4850541 | 0.000257 |
| NM_001414 | 2760563 | | BX096603 | 4880373 | 0.000369 |
| NM_005082 | 2850576 | | NM_014281 | 4900053 | 1.89E−05 |
| NM_001384 | 2900524 | | NM_015702 | 5090204 | 0.000414 |
| NM_006328 | 2970332 | | NM_003559 | 5090477 | 0.00074 |
| NM_031488 | 3120301 | | NM_032312 | 5290289 | 0.000641 |
| XM_001127981 | 3130392 | | NM_003906 | 5390131 | 0.000496 |
| NM_006767 | 3140093 | | NM_013270 | 5690037 | 0.000251 |
| NM_015710 | 3170092 | | NM_032118 | 5700403 | 0.000798 |
| NM_014941 | 3360364 | | BU733214 | 5860196 | 0.000367 |
| NM_020808 | 3370605 | | NM_006082 | 5900156 | 0.000222 |
| NM_005698 | 3370687 | | NM_178510 | 5910091 | 0.000822 |
| NM_207311 | 3420343 | | NM_170699 | 5960035 | 0.000233 |
| NM_001042600 | 3420630 | | NM_007255 | 6100220 | 0.00078 |
| NM_015288 | 3420735 | | NM_004044 | 6110768 | 0.000385 |
| NM_139244 | 3460189 | | NM_000074 | 6270128 | 8.15E−05 |
| NM_003137 | 3460674 | | AL157484 | 6280682 | 0.000692 |
| NM_003707 | 3520082 | | NM_001039508 | 6280754 | 0.000859 |
| NM_213566 | 3520192 | | NM_033416 | 6380598 | 0.000496 |
| NM_005476 | 3610504 | | NM_001040107 | 6400563 | 0.000184 |
| XM_930898 | 3830390 | | NM_024619 | 6590386 | 0.000143 |
| NM_004092 | 3840022 | | NM_030911 | 6660671 | 0.00082 |
| X00437 | 3990639 | | BX110808 | 6770491 | 0.000657 |
| NM_015054 | 4060056 | | NM_004964 | 6940242 | 0.000592 |
| NM_004811 | 4060131 | | NM_018384 | 6960746 | 0.000337 |
| NM_022827 | 4120133 | | NM_004776 | 6980070 | 0.000193 |
| AA868051 | 4150402 | | NM_178839 | 6980609 | 0.000248 |
| NM_016091 | 4180142 | | NM_078483 | 7100136 | 0.000162 |
| XM_068632 | 4200451 | | NM_006429 | 7150017 | 0.000353 |
| NM_015721 | 4200538 | | NM_006901 | 7150634 | 0.000569 |
| NM_024600 | 4210647 | | NM_001008269 | 7320100 | 0.000502 |
| NM_001042631 | 4220138 | | NM_002566 | 7330487 | 0.000769 |
| BU608944 | 4220523 | | NM_016237 | 7380288 | 0.000729 |
| NM_020414 | 4280332 | | NM_001152 | 7550537 | 0.000167 |
| NM_015651 | 4540082 | | | | |
| NM_015433 | 4540301 | | | | |
| NM_006445 | 4590082 | | | | |
| NM_001024667 | 4590646 | | | | |
| NM_025228 | 4640528 | | | | |
| NM_003543 | 4730195 | | | | |
| CK300859 | 4730577 | | | | |
| NM_016553 | 4760543 | | | | |
| NM_005243 | 4780743 | | | | |
| NM_006725 | 4850192 | | | | |
| NM_024092 | 4880364 | | | | |
| NM_014281 | 4900053 | | | | |
| NM_007047 | 4920577 | | | | |
| NM_003559 | 5090477 | | | | |
| NM_007355 | 5130082 | | | | |
| BU587445 | 5130747 | | | | |
| NM_000075 | 5270500 | | | | |
| NM_022730 | 5310050 | | | | |
| NM_001007239 | 5310754 | | | | |
| NM_003906 | 5390131 | | | | |
| NM_152272 | 5550746 | | | | |
| AK125708 | 5560093 | | | | |
| CR738137 | 5570632 | | | | |
| NM_013270 | 5690037 | | | | |
| NM_002139 | 5690673 | | | | |
| NM_032118 | 5700403 | | | | |
| NM_173791 | 5720398 | | | | |
| NM_001628 | 5890327 | | | | |
| NM_006082 | 5900156 | | | | |
| NM_178510 | 5910091 | | | | |
| NM_170699 | 5960035 | | | | |
| NM_014230 | 6020402 | | | | |
| NM_032853 | 6040259 | | | | |
| NM_007255 | 6100220 | | | | |
| NM_144666 | 6110142 | | | | |
| XM_931928 | 6110537 | | | | |
| NM_004044 | 6110768 | | | | |
| NM_017879 | 6250047 | | | | |
| NM_005968 | 6270021 | | | | |
| NM_000074 | 6270128 | | | | |
| NM_015044 | 6270364 | | | | |
| NM_001039508 | 6280754 | | | | |
| NM_003755 | 6290431 | | | | |
| XM_936128 | 6290561 | | | | |
| NM_033301 | 6380148 | | | | |
| NM_033416 | 6380598 | | | | |
| NM_001005332 | 6480170 | | | | |
| NM_025150 | 6480328 | | | | |
| NM_033554 | 6480500 | | | | |
| XR_018793 | 6550142 | | | | |
| NM_024619 | 6590386 | | | | |
| NM_001007224 | 6590523 | | | | |
| CA424950 | 6650576 | | | | |
| NM_015540 | 6860243 | | | | |
| NM_004964 | 6940242 | | | | |
| NM_018384 | 6960746 | | | | |
| NM_004776 | 6980070 | | | | |
| BI915661 | 6980274 | | | | |
| NM_138576 | 7000133 | | | | |
| NM_182476 | 7050543 | | | | |
| NM_078483 | 7100136 | | | | |
| NM_006429 | 7150017 | | | | |
| NM_014165 | 7150601 | | | | |
| NM_006901 | 7150634 | | | | |
| NM_014976 | 7160296 | | | | |
| NM_003757 | 7320576 | | | | |
| NM_007167 | 7380274 | | | | |
| NM_016237 | 7380288 | | | | |
| NM_199176 | 7380736 | | | | |
| NM_004515 | 7400431 | | | | |
| NM_001037161 | 7510224 | | | | |
| NM_001152 | 7550537 | | | | |

| | |
|---|---|
| List 36 | List 37 |

| AUC | | 0.83 | | | 0.83 |
|---|---|---|---|---|---|
| Number of | | 133 | | | 66 |
| Transcripts | | | | | |
| Acc.-No. | Probe ID | p-Value | Acc.-No. | Probe ID | p-Value |
| NM_015062 | 20647 | 0.00029 | XM_932547 | 160121 | 0.000544 |
| NM_182898 | 160132 | 0.000337 | NM_002348 | 450037 | 0.000351 |
| XM_933240 | 160202 | 0.000856 | NM_018715 | 510450 | 0.000153 |
| NM_016292 | 160736 | 0.000824 | NM_000155 | 520332 | 0.000379 |
| BM981444 | 240653 | 0.00033 | NM_000896 | 650164 | 4.19E−05 |
| NM_005103 | 360343 | 0.000565 | CR596519 | 670041 | 0.000321 |
| NM_002348 | 450037 | 0.000343 | XR_015582 | 770452 | 0.000289 |
| NM_194260 | 460273 | 0.000767 | AF272739 | 1050128 | 8.83E−05 |
| NM_021872 | 460754 | 0.0007 | NM_015292 | 1110215 | 0.000717 |
| NM_018715 | 510450 | 0.000131 | NM_000887 | 1240603 | 0.000605 |
| NM_000155 | 520332 | 2.35E−05 | NM_000578 | 1430292 | 0.00066 |
| NM_002129 | 610563 | 0.000374 | NM_001037325 | 1470332 | 0.000893 |
| NM_000896 | 650164 | 0.00015 | NM_015039 | 1580348 | 0.000316 |
| CR596519 | 670041 | 0.000147 | NM_001099786 | 1820598 | 0.000518 |
| AF272739 | 1050128 | 0.000152 | XM_936353 | 2030544 | 0.000513 |
| NM_015292 | 1110215 | 0.00015 | AA910733 | 2070452 | 0.000848 |
| NM_006720 | 1110575 | 0.000762 | CK299581 | 2120356 | 0.000628 |
| NM_000878 | 1170307 | 0.000104 | XM_935843 | 2260446 | 0.000632 |
| NM_000887 | 1240603 | 0.000197 | NM_007115 | 2370524 | 2.66E−05 |
| NM_021105 | 1260228 | 0.000594 | T03068 | 2450497 | 9.16E−05 |
| NM_000578 | 1430292 | 0.000702 | NM_031412 | 2630154 | 0.000461 |
| NM_015039 | 1580348 | 0.000112 | NM_003528 | 2630451 | 0.000164 |
| NM_002405 | 1710286 | 0.000679 | NM_025153 | 2630484 | 5.73E−06 |
| NM_018285 | 1780348 | 0.000315 | NM_031488 | 3120301 | 0.000356 |
| NM_001099786 | 1820598 | 0.000486 | NM_014941 | 3360364 | 0.000257 |
| NM_024108 | 1980424 | 0.00077 | NM_139244 | 3460189 | 0.000544 |
| BM272556 | 2000474 | 0.000743 | NM_003137 | 3460674 | 0.000329 |
| NM_004226 | 2100035 | 0.000361 | NM_003707 | 3520082 | 0.000548 |
| NM_198196 | 2100333 | 0.000214 | NM_213566 | 3520192 | 0.000494 |
| NM_014738 | 2190673 | 0.000171 | NM_005476 | 3610504 | 0.00042 |
| XM_935843 | 2260446 | 0.000147 | NM_000648 | 3800270 | 0.000658 |
| NM_007115 | 2370524 | 5.38E−06 | XM_930898 | 3830390 | 9.69E−05 |
| T03068 | 2450497 | 0.000187 | BU729036 | 3850367 | 0.000728 |
| NM_003528 | 2630451 | 0.000475 | XM_940524 | 3940368 | 0.000574 |
| NM_025153 | 2630484 | 4.79E−05 | X00437 | 3990639 | 0.000503 |
| NM_001004486 | 2650435 | 0.000736 | NM_139247 | 4230653 | 0.000805 |
| NM_019111 | 2680370 | 0.00088 | NM_020414 | 4280332 | 0.000499 |
| NM_001014838 | 2690609 | 0.000385 | AI433683 | 4560463 | 0.000717 |
| NM_003059 | 2710397 | 0.000618 | NM_003543 | 4730195 | 7.59E−05 |
| NM_005449 | 2760092 | 0.000716 | NM_016553 | 4760543 | 0.000244 |
| NM_001414 | 2760563 | 0.000392 | NM_016552 | 4850541 | 0.00067 |
| NM_031488 | 3120301 | 7.69E−05 | NM_014281 | 4900053 | 0.000355 |
| NM_017905 | 3130091 | 0.000503 | NM_003559 | 5090477 | 0.00048 |
| NM_004555 | 3130291 | 0.000433 | NM_002150 | 5090554 | 0.000387 |
| NM_006767 | 3140093 | 0.000793 | AA765688 | 5090647 | 0.00087 |
| NM_015710 | 3170092 | 0.000556 | CD243631 | 5270450 | 0.000608 |
| NM_014941 | 3360364 | 0.000147 | NM_006321 | 5390669 | 0.000818 |
| NM_005698 | 3370687 | 0.000692 | NM_013270 | 5690037 | 0.000449 |
| NM_015288 | 3420735 | 0.000198 | NM_002808 | 5720497 | 0.000366 |
| NM_139244 | 3460189 | 0.000564 | BU733214 | 5860196 | 0.000376 |
| NM_024430 | 3460523 | 0.000681 | NM_021052 | 5860400 | 0.000553 |
| NM_003137 | 3460674 | 0.000151 | BM974838 | 5870300 | 0.000467 |
| NM_003707 | 3520082 | 0.000716 | NM_006082 | 5900156 | 0.000428 |
| NM_213566 | 3520192 | 0.000105 | XM_931928 | 6110537 | 0.000484 |
| XM_930898 | 3830390 | 0.000161 | NM_004044 | 6110768 | 0.000594 |
| NM_004092 | 3840022 | 0.000609 | NM_000074 | 6270128 | 0.000132 |
| XM_940524 | 3940368 | 0.00042 | NM_033416 | 6380598 | 0.000237 |
| XM_496059 | 3990465 | 0.000615 | NM_033554 | 6480500 | 0.000848 |
| X00437 | 3990639 | 0.000235 | NM_024619 | 6590386 | 0.000849 |
| NM_004811 | 4060131 | 0.000831 | NM_018384 | 6960746 | 0.000361 |
| NM_022827 | 4120133 | 0.000505 | NM_004776 | 6980070 | 0.000499 |
| NM_001779 | 4150161 | 0.00042 | BI915661 | 6980274 | 0.000463 |
| AA868051 | 4150402 | 0.000207 | XM_943393 | 7050196 | 0.000729 |
| NM_002756 | 4150632 | 0.000469 | NM_078483 | 7100136 | 0.000439 |
| XM_068632 | 4200451 | 0.000873 | NM_006901 | 7150634 | 0.000284 |
| NM_015721 | 4200538 | 0.000584 | NM_001152 | 7550537 | 0.000158 |
| NM_024600 | 4210647 | 0.000148 | | | |
| NM_183384 | 4280047 | 0.000803 | | | |
| NM_020414 | 4280332 | 0.000117 | | | |
| NM_015651 | 4540082 | 0.000304 | | | |
| BC016972 | 4540088 | 0.000796 | | | |
| NM_015433 | 4540301 | 0.000711 | | | |
| AI433683 | 4560463 | 0.000705 | | | |
| NM_138931 | 4640044 | 0.000713 | | | |
| AK055286 | 4640369 | 0.0007 | | | |
| NM_025228 | 4640528 | 0.000891 | | | |
| NM_003543 | 4730195 | 0.000236 | | | |
| NM_001017404 | 4760364 | 0.00038 | | | |
| NM_016553 | 4760543 | 4.28E−05 | | | |
| NM_006725 | 4850192 | 0.000318 | | | |
| NM_021809 | 4850438 | 0.000722 | | | |
| NM_016552 | 4850541 | 0.000256 | | | |
| NM_015239 | 4860132 | 0.000443 | | | |
| NM_014281 | 4900053 | 9.51E−05 | | | |
| NM_018079 | 5080056 | 0.0007 | | | |
| NM_003559 | 5090477 | 0.00056 | | | |
| AA431917 | 5130154 | 0.00036 | | | |
| NM_005902 | 5130767 | 0.000572 | | | |
| XM_941161 | 5270689 | 0.000583 | | | |
| NM_032312 | 5290289 | 0.000232 | | | |
| DB081324 | 5290291 | 0.000823 | | | |
| NM_001007239 | 5310754 | 0.000388 | | | |
| NM_003906 | 5390131 | 0.000811 | | | |
| NM_006321 | 5390669 | 0.000576 | | | |
| NM_152272 | 5550746 | 0.000894 | | | |
| NM_013270 | 5690037 | 5.68E−05 | | | |
| NM_032118 | 5700403 | 0.000329 | | | |
| BU733214 | 5860196 | 0.000752 | | | |
| NM_021052 | 5860400 | 0.000785 | | | |
| NM_006082 | 5900156 | 0.000438 | | | |
| NM_178510 | 5910091 | 0.000459 | | | |
| NM_003415 | 6020132 | 0.000835 | | | |
| NM_014230 | 6020402 | 0.000743 | | | |
| NM_003645 | 6110328 | 0.000347 | | | |
| NM_004044 | 6110768 | 0.000153 | | | |
| NM_005968 | 6270021 | 0.000656 | | | |
| NM_000074 | 6270128 | 0.000174 | | | |
| NM_002964 | 6280576 | 0.000386 | | | |
| NM_001039508 | 6280754 | 0.000586 | | | |
| XM_936128 | 6290561 | 0.00059 | | | |
| NM_033416 | 6380598 | 0.000425 | | | |
| NM_001040107 | 6400563 | 0.000633 | | | |
| AK128384 | 6420541 | 0.000366 | | | |
| NM_001005332 | 6480170 | 0.000873 | | | |
| NM_033554 | 6480500 | 0.000209 | | | |
| NM_024619 | 6590386 | 0.000208 | | | |
| NM_001007224 | 6590523 | 0.000785 | | | |
| AA576740 | 6840408 | 0.000455 | | | |
| NM_018384 | 6960746 | 0.000158 | | | |
| NM_004776 | 6980070 | 0.000353 | | | |
| NM_138576 | 7000133 | 0.000571 | | | |
| NM_025263 | 7000408 | 0.000678 | | | |
| NM_017773 | 7000768 | 0.000871 | | | |
| NM_182476 | 7050543 | 0.000265 | | | |
| NM_078483 | 7100136 | 0.000348 | | | |
| NM_017481 | 7100392 | 0.000469 | | | |
| NM_006901 | 7150634 | 0.000566 | | | |
| NM_014976 | 7160296 | 0.000616 | | | |
| AW263210 | 7200477 | 0.000483 | | | |
| NM_002566 | 7330487 | 0.000789 | | | |
| NM_016237 | 7380288 | 0.000652 | | | |
| NM_001152 | 7550537 | 0.000125 | | | |
| NM_001313 | 7650458 | 0.000741 | | | |

| | |
|---|---|
| List 38 | List 39 |

| AUC | | 0.83 | | | 0.93 |
|---|---|---|---|---|---|
| Number of | | 174 | | | 99 |
| Transcripts | | | | | |
| | Probe | | | Probe | |
| Acc.-No. | ID | p-Value | Acc.-No. | ID | p-Value |
| NM_001031717 | 10338 | 0.000505 | NM_182898 | 160132 | 0.000251 |
| NM_015062 | 20647 | 0.000585 | NM_002348 | 450037 | 0.000325 |
| NM_006567 | 130403 | 0.00043 | NM_194260 | 460273 | 0.0003 |
| NM_182898 | 160132 | 0.000737 | NM_018715 | 510450 | 9.61E−05 |
| NM_005804 | 160240 | 0.000598 | NM_000155 | 520332 | 0.000228 |
| NM_016292 | 160736 | 0.000413 | NM_002129 | 610563 | 0.000746 |
| BM981444 | 240653 | 0.000605 | NM_000896 | 650164 | 0.000219 |
| NM_013378 | 360066 | 0.000592 | CR596519 | 670041 | 0.000556 |
| NM_015959 | 380315 | 0.0003 | AF272739 | 1050128 | 0.000586 |
| NM_015953 | 380685 | 0.000531 | NM_015292 | 1110215 | 0.000501 |
| NM_002348 | 450037 | 0.000157 | NM_000887 | 1240603 | 0.000255 |
| NM_021872 | 460754 | 0.000306 | NM_021105 | 1260228 | 0.000814 |
| NM_018715 | 510450 | 1.30E−05 | NM_016286 | 1410369 | 0.00052 |
| NM_000155 | 520332 | 6.03E−05 | NM_000578 | 1430292 | 0.000584 |
| NM_002896 | 620722 | 0.000193 | NM_016408 | 1440601 | 0.0009 |
| NM_000896 | 650164 | 0.000404 | NM_001037325 | 1470332 | 0.000876 |
| CR596519 | 670041 | 4.42E−05 | NM_015039 | 1580348 | 0.000158 |
| NM_199337 | 840730 | 0.00058 | BX101820 | 1690504 | 0.000107 |
| NM_031206 | 1010612 | 0.000807 | NM_002405 | 1710286 | 0.000137 |
| NM_004927 | 1030692 | 6.28E−05 | NM_018285 | 1780348 | 0.000257 |
| AF272739 | 1050128 | 0.000205 | NM_001099786 | 1820598 | 0.000418 |
| NM_153611 | 1090048 | 0.000874 | NM_012395 | 2000390 | 0.000425 |
| NM_015292 | 1110215 | 4.92E−05 | NM_004226 | 2100035 | 0.000859 |
| NM_006720 | 1110575 | 0.000623 | NM_017758 | 2100221 | 0.000121 |
| NM_000887 | 1240603 | 0.000262 | CK299581 | 2120356 | 0.000303 |
| NM_021105 | 1260228 | 0.00079 | NM_014738 | 2190673 | 0.000185 |
| NM_006066 | 1300768 | 0.000716 | XM_935843 | 2260446 | 0.000153 |
| XM_377476 | 1340338 | 0.000496 | NM_007115 | 2370524 | 3.72E−06 |
| NM_001039708 | 1340731 | 0.000528 | BQ372445 | 2370681 | 0.000584 |
| NM_004716 | 1400270 | 0.000621 | T03068 | 2450497 | 0.000721 |
| NM_000578 | 1430292 | 0.000314 | NM_181803 | 2450603 | 0.000989 |
| NM_002080 | 1440546 | 0.000602 | NM_003528 | 2630451 | 0.000937 |
| NM_016408 | 1440601 | 4.37E−05 | NM_025153 | 2630484 | 0.000145 |
| NM_004608 | 1570056 | 0.000848 | NM_005980 | 2640609 | 0.000931 |
| NM_015039 | 1580348 | 0.000304 | NM_001014838 | 2690609 | 0.000645 |
| NM_006424 | 1710189 | 0.000791 | NM_001854 | 2750070 | 0.000658 |
| NM_002405 | 1710286 | 0.000585 | NM_003707 | 2750408 | 0.00087 |
| NM_014871 | 1740576 | 0.000606 | NM_031488 | 3120301 | 0.000158 |
| NM_018285 | 1780348 | 0.00013 | NM_205548 | 3140088 | 0.000507 |
| NM_001099786 | 1820598 | 3.38E−05 | NM_033111 | 3140246 | 0.000989 |
| XM_936353 | 2030544 | 0.00027 | CB046255 | 3310075 | 0.000367 |
| NM_198196 | 2100333 | 0.000584 | BI260057 | 3310341 | 0.000518 |
| NM_001077692 | 2120681 | 0.000383 | NM_014941 | 3360364 | 4.61E−05 |
| NM_014738 | 2190673 | 0.000294 | NM_005698 | 3370687 | 0.000458 |
| NM_007115 | 2370524 | 1.79E−05 | NM_003137 | 3460674 | 0.00014 |
| BX096685 | 2450343 | 0.000243 | NM_213566 | 3520192 | 0.000899 |
| T03068 | 2450497 | 5.57E−05 | NM_005476 | 3610504 | 0.000258 |
| NM_024798 | 2470341 | 0.000541 | NM_004092 | 3840022 | 0.000495 |
| NM_006031 | 2480082 | 0.000437 | X00437 | 3990639 | 0.000336 |
| AW578902 | 2510324 | 0.00085 | AA868051 | 4150402 | 0.000262 |
| NM_031412 | 2630154 | 0.000422 | NM_001042631 | 4220138 | 0.000866 |
| NM_003528 | 2630451 | 0.000458 | AI863525 | 4230520 | 0.000274 |
| NM_025153 | 2630484 | 9.60E−05 | NM_139247 | 4230653 | 0.000973 |
| NM_005937 | 2630719 | 0.000517 | NM_183384 | 4280047 | 0.000834 |
| NM_019111 | 2680370 | 0.000297 | NM_020414 | 4280332 | 0.000423 |
| NM_001014838 | 2690609 | 9.68E−05 | NM_015651 | 4540082 | 0.000308 |
| NM_003707 | 2750408 | 0.000452 | NM_015433 | 4540301 | 0.000651 |
| NM_015135 | 2750521 | 0.00042 | AI433683 | 4560463 | 0.000984 |
| NM_005449 | 2760092 | 0.000386 | NM_003543 | 4730195 | 0.000341 |
| NM_001414 | 2760563 | 0.000352 | CK300859 | 4730577 | 0.000106 |
| XM_942926 | 2810674 | 0.000825 | NM_016553 | 4760543 | 2.55E−05 |
| NM_005082 | 2850576 | 0.0003 | NM_006725 | 4850192 | 0.000947 |
| NM_001384 | 2900524 | 0.000694 | NM_016552 | 4850541 | 0.000257 |
| NM_006328 | 2970332 | 0.000765 | BX096603 | 4880373 | 0.000369 |
| NM_031488 | 3120301 | 0.000101 | NM_014281 | 4900053 | 1.89E−05 |
| XM_001127981 | 3130392 | 0.000793 | NM_015702 | 5090204 | 0.000414 |
| NM_006767 | 3140093 | 9.93E−05 | NM_003559 | 5090477 | 0.00074 |
| NM_015710 | 3170092 | 0.000305 | NM_032312 | 5290289 | 0.000641 |
| NM_014941 | 3360364 | 7.94E−05 | NM_001007239 | 5310754 | 0.000923 |
| NM_020808 | 3370605 | 0.000651 | NM_003906 | 5390131 | 0.000496 |
| NM_005698 | 3370687 | 0.000781 | NM_013270 | 5690037 | 0.000251 |
| NM_207311 | 3420343 | 0.000462 | NM_032118 | 5700403 | 0.000798 |
| NM_001042600 | 3420630 | 0.000387 | BU733214 | 5860196 | 0.000367 |
| NM_015288 | 3420735 | 0.000524 | NM_006082 | 5900156 | 0.000222 |
| NM_139244 | 3460189 | 0.000483 | NM_178510 | 5910091 | 0.000822 |
| NM_003137 | 3460674 | 0.000106 | NM_170699 | 5960035 | 0.000233 |
| NM_003707 | 3520082 | 0.000268 | NM_007255 | 6100220 | 0.00078 |
| NM_213566 | 3520192 | 0.000257 | NM_004044 | 6110768 | 0.000385 |
| NM_005476 | 3610504 | 5.91E−06 | NM_000074 | 6270128 | 8.15E−05 |
| XM_932678 | 3800253 | 0.000877 | AL157484 | 6280682 | 0.000692 |
| XM_930898 | 3830390 | 0.000483 | NM_001039508 | 6280754 | 0.000859 |
| NM_004092 | 3840022 | 0.000774 | NM_005176 | 6350360 | 0.000972 |
| NM_001040167 | 3890095 | 0.000877 | XM_001133111 | 6370463 | 0.000949 |
| X00437 | 3990639 | 7.90E−05 | NM_033416 | 6380598 | 0.000496 |
| NM_015054 | 4060056 | 0.00066 | NM_001040107 | 6400563 | 0.000184 |
| NM_004811 | 4060131 | 0.000337 | NM_024619 | 6590386 | 0.000143 |
| NM_022827 | 4120133 | 0.00028 | NM_030911 | 6660671 | 0.00082 |
| AA868051 | 4150402 | 0.000788 | BX110808 | 6770491 | 0.000657 |
| NM_016091 | 4180142 | 0.000453 | NM_004964 | 6940242 | 0.000592 |
| XM_068632 | 4200451 | 0.000539 | NM_018384 | 6960746 | 0.000337 |
| NM_015721 | 4200538 | 0.000448 | NM_004776 | 6980070 | 0.000193 |
| NM_024600 | 4210647 | 0.000218 | NM_178839 | 6980609 | 0.000248 |
| NM_001042631 | 4220138 | 3.86E−05 | NM_078483 | 7100136 | 0.000162 |
| BU608944 | 4220523 | 0.00047 | NM_006429 | 7150017 | 0.000353 |
| NM_139247 | 4230653 | 0.00085 | NM_006901 | 7150634 | 0.000569 |
| NM_020414 | 4280332 | 0.000117 | NM_001008269 | 7320100 | 0.000502 |
| NM_015651 | 4540082 | 0.000122 | NM_002566 | 7330487 | 0.000769 |
| NM_015433 | 4540301 | 0.000501 | NM_016237 | 7380288 | 0.000729 |
| NM_006445 | 4590082 | 0.000457 | NM_001152 | 7550537 | 0.000167 |
| NM_001024667 | 4590646 | 0.000137 | | | |
| NM_025228 | 4640528 | 0.000617 | | | |
| NM_003543 | 4730195 | 0.000136 | | | |
| CK300859 | 4730577 | 0.000288 | | | |
| NM_016553 | 4760543 | 3.10E−05 | | | |
| NM_005243 | 4780743 | 0.000104 | | | |
| NM_030811 | 4830435 | 0.000887 | | | |
| NM_006725 | 4850192 | 0.000138 | | | |
| NM_024092 | 4880364 | 0.000716 | | | |
| NM_014281 | 4900053 | 4.57E−05 | | | |
| NM_007047 | 4920577 | 0.000318 | | | |
| NM_003559 | 5090477 | 0.000745 | | | |
| NM_007355 | 5130082 | 0.000293 | | | |
| BU587445 | 5130747 | 0.000716 | | | |
| NM_000075 | 5270500 | 0.000307 | | | |
| NM_022730 | 5310050 | 0.000512 | | | |
| NM_001007239 | 5310754 | 0.000134 | | | |
| NM_003906 | 5390131 | 0.000193 | | | |
| NM_001001998 | 5490142 | 0.000888 | | | |
| NM_152272 | 5550746 | 0.000311 | | | |
| AK125708 | 5560093 | 0.000731 | | | |
| CR738137 | 5570632 | 0.000422 | | | |
| NM_013270 | 5690037 | 0.000207 | | | |
| NM_002139 | 5690673 | 0.00033 | | | |
| NM_032118 | 5700403 | 0.000303 | | | |
| NM_173791 | 5720398 | 0.000647 | | | |
| NM_001628 | 5890327 | 0.000232 | | | |
| NM_006082 | 5900156 | 0.000463 | | | |
| NM_178510 | 5910091 | 3.75E−05 | | | |
| NM_170699 | 5960035 | 0.000309 | | | |
| NM_014230 | 6020402 | 0.000423 | | | |
| NM_032853 | 6040259 | 0.000769 | | | |
| NM_007255 | 6100220 | 0.000328 | | | |
| NM_144666 | 6110142 | 0.000278 | | | |
| XM_931928 | 6110537 | 0.000164 | | | |
| NM_004044 | 6110768 | 0.00024 | | | |
| NM_017879 | 6250047 | 0.000689 | | | |
| NM_005968 | 6270021 | 5.91E−05 | | | |
| NM_000074 | 6270128 | 2.40E−05 | | | |
| NM_015044 | 6270364 | 0.000463 | | | |
| NM_001039508 | 6280754 | 0.000111 | | | |
| NM_003755 | 6290431 | 0.000599 | | | |
| XM_936128 | 6290561 | 0.000182 | | | |
| NM_033301 | 6380148 | 0.000611 | | | |
| NM_033416 | 6380598 | 0.000216 | | | |
| NM_001005332 | 6480170 | 0.000377 | | | |
| NM_025150 | 6480328 | 0.000272 | | | |
| NM_033554 | 6480500 | 0.00015 | | | |
| XR_018793 | 6550142 | 0.000362 | | | |
| NM_024619 | 6590386 | 4.64E−05 | | | |
| NM_001007224 | 6590523 | 0.000674 | | | |
| NM_176880 | 6650541 | 0.000817 | | | |
| CA424950 | 6650576 | 0.000636 | | | |
| NM_015540 | 6860243 | 0.00038 | | | |
| NM_004964 | 6940242 | 0.000349 | | | |
| M97723 | 6940246 | 0.000865 | | | |
| NM_018384 | 6960746 | 9.79E−05 | | | |
| NM_004776 | 6980070 | 0.000502 | | | |
| BI915661 | 6980274 | 0.000496 | | | |
| NM_138576 | 7000133 | 0.000541 | | | |
| NM_182476 | 7050543 | 0.000713 | | | |
| NM_078483 | 7100136 | 0.000449 | | | |
| NM_017481 | 7100392 | 0.000862 | | | |
| NM_006429 | 7150017 | 0.000585 | | | |
| NM_014165 | 7150601 | 0.00013 | | | |
| NM_006901 | 7150634 | 6.17E−05 | | | |
| NM_014976 | 7160296 | 0.000121 | | | |
| NM_003757 | 7320576 | 0.000262 | | | |
| NM_007167 | 7380274 | 0.000374 | | | |
| NM_016237 | 7380288 | 0.000189 | | | |
| NM_199176 | 7380736 | 0.000151 | | | |
| NM_004515 | 7400431 | 0.000268 | | | |
| NM_001037161 | 7510224 | 0.000692 | | | |
| NM_001152 | 7550537 | 3.79E−05 | | | |
| AW378958 | 7650195 | 0.000868 | | | |

| | |
|---|---|
| List 40 | List 41 |

| AUC | | 0.83 | | | 0.83 |
|---|---|---|---|---|---|
| Number of | | 139 | | | 76 |
| Transcripts | | | | | |
| Acc.-No. | Probe ID | p-Value | Acc.-No. | Probe ID | p-Value |
| NM_023003 | 10541 | 0.000994 | XM_001129663 | 130288 | 0.000967555 |
| NM_015062 | 20647 | 0.00029 | AF086457 | 150711 | 0.000995494 |
| NM_022136 | 150632 | 0.000985 | XM_932547 | 160121 | 0.000543584 |
| NM_182898 | 160132 | 0.000337 | NM_012212 | 430100 | 0.000975513 |
| XM_933240 | 160202 | 0.000856 | NM_002348 | 450037 | 0.000350758 |
| NM_016292 | 160736 | 0.000824 | NM_018715 | 510450 | 0.000153264 |
| BM981444 | 240653 | 0.00033 | NM_000155 | 520332 | 0.000379381 |
| NM_005103 | 360343 | 0.000565 | NM_000896 | 650164 | 4.19E−05 |
| NM_002348 | 450037 | 0.000343 | CR596519 | 670041 | 0.000321057 |
| NM_194260 | 460273 | 0.000767 | XR_015582 | 770452 | 0.00028943 |
| NM_021872 | 460754 | 0.0007 | AF272739 | 1050128 | 8.83E−05 |
| NM_018715 | 510450 | 0.000131 | NM_015292 | 1110215 | 0.000716998 |
| NM_000155 | 520332 | 2.35E−05 | NM_000887 | 1240603 | 0.000604748 |
| NM_002129 | 610563 | 0.000374 | NM_000578 | 1430292 | 0.000659744 |
| NM_000896 | 650164 | 0.00015 | NM_001037325 | 1470332 | 0.000892709 |
| CR596519 | 670041 | 0.000147 | NM_015039 | 1580348 | 0.00031588 |
| AF272739 | 1050128 | 0.000152 | NM_001099786 | 1820598 | 0.00051759 |
| NM_015292 | 1110215 | 0.00015 | XM_936353 | 2030544 | 0.000512868 |
| NM_006720 | 1110575 | 0.000762 | AA910733 | 2070452 | 0.00084824 |
| NM_000878 | 1170307 | 0.000104 | CK299581 | 2120356 | 0.000628114 |
| NM_000887 | 1240603 | 0.000197 | XM_935843 | 2260446 | 0.0006325 |
| NM_021105 | 1260228 | 0.000594 | NM_007115 | 2370524 | 2.66E−05 |
| NM_000578 | 1430292 | 0.000702 | T03068 | 2450497 | 9.16E−05 |
| NM_007199 | 1430762 | 0.000974 | NM_031412 | 2630154 | 0.000460849 |
| NM_016408 | 1440601 | 0.000952 | NM_003528 | 2630451 | 0.000164316 |
| NM_015039 | 1580348 | 0.000112 | NM_025153 | 2630484 | 5.73E−06 |
| NM_002405 | 1710286 | 0.000679 | NM_031488 | 3120301 | 0.00035633 |
| NM_018285 | 1780348 | 0.000315 | NM_014941 | 3360364 | 0.000256835 |
| NM_001099786 | 1820598 | 0.000486 | NM_139244 | 3460189 | 0.000543541 |
| NM_024108 | 1980424 | 0.00077 | NM_003137 | 3460674 | 0.000329184 |
| BM272556 | 2000474 | 0.000743 | NM_003707 | 3520082 | 0.000548335 |
| NM_004226 | 2100035 | 0.000361 | NM_213566 | 3520192 | 0.000493729 |
| NM_198196 | 2100333 | 0.000214 | NM_005476 | 3610504 | 0.00041975 |
| NM_014738 | 2190673 | 0.000171 | NM_000648 | 3800270 | 0.000658 |
| XM_935843 | 2260446 | 0.000147 | XM_930898 | 3830390 | 9.69E−05 |
| NM_007115 | 2370524 | 5.38E−06 | BU729036 | 3850367 | 0.000727926 |
| T03068 | 2450497 | 0.000187 | XM_940524 | 3940368 | 0.000574144 |
| NM_003528 | 2630451 | 0.000475 | X00437 | 3990639 | 0.000502646 |
| NM_025153 | 2630484 | 4.79E−05 | NM_001042631 | 4220138 | 0.000983279 |
| NM_001004486 | 2650435 | 0.000736 | NM_139247 | 4230653 | 0.000804645 |
| NM_019111 | 2680370 | 0.00088 | NM_020414 | 4280332 | 0.000499428 |
| NM_001014838 | 2690609 | 0.000385 | AI433683 | 4560463 | 0.000717484 |
| NM_003059 | 2710397 | 0.000618 | NM_003543 | 4730195 | 7.59E−05 |
| NM_005449 | 2760092 | 0.000716 | CK300859 | 4730577 | 0.000936691 |
| NM_001414 | 2760563 | 0.000392 | NM_016553 | 4760543 | 0.000243693 |
| NM_031488 | 3120301 | 7.69E−05 | NM_016552 | 4850541 | 0.000669538 |
| NM_017905 | 3130091 | 0.000503 | NM_014281 | 4900053 | 0.000354862 |
| NM_004555 | 3130291 | 0.000433 | NM_003559 | 5090477 | 0.000479668 |
| NM_006767 | 3140093 | 0.000793 | NM_002150 | 5090554 | 0.000386719 |
| NM_015710 | 3170092 | 0.000556 | AA765688 | 5090647 | 0.000869847 |
| NM_014941 | 3360364 | 0.000147 | CD243631 | 5270450 | 0.00060787 |
| NM_005698 | 3370687 | 0.000692 | NM_006321 | 5390669 | 0.00081847 |
| NM_015288 | 3420735 | 0.000198 | NM_013270 | 5690037 | 0.000448829 |
| NM_139244 | 3460189 | 0.000564 | NM_002808 | 5720497 | 0.000365747 |
| NM_024430 | 3460523 | 0.000681 | BU733214 | 5860196 | 0.000376113 |
| NM_003137 | 3460674 | 0.000151 | NM_021052 | 5860400 | 0.000553416 |
| NM_003707 | 3520082 | 0.000716 | BM974838 | 5870300 | 0.000467433 |
| NM_213566 | 3520192 | 0.000105 | NM_006082 | 5900156 | 0.000427862 |
| NM_001002010 | 3780689 | 0.000968 | XM_931928 | 6110537 | 0.000483991 |
| XM_930898 | 3830390 | 0.000161 | NM_004044 | 6110768 | 0.000593588 |
| NM_004092 | 3840022 | 0.000609 | NM_000074 | 6270128 | 0.000132118 |
| XM_940524 | 3940368 | 0.00042 | NM_033416 | 6380598 | 0.000237334 |
| XM_496059 | 3990465 | 0.000615 | NM_033554 | 6480500 | 0.00084761 |
| X00437 | 3990639 | 0.000235 | NM_024619 | 6590386 | 0.000849346 |
| NM_004811 | 4060131 | 0.000831 | NM_018384 | 6960746 | 0.000360717 |
| NM_022827 | 4120133 | 0.000505 | NM_004776 | 6980070 | 0.000499209 |
| NM_001779 | 4150161 | 0.00042 | BI915661 | 6980274 | 0.000463447 |
| AA868051 | 4150402 | 0.000207 | XM_943393 | 7050196 | 0.000728506 |
| NM_002756 | 4150632 | 0.000469 | NM_078483 | 7100136 | 0.000438979 |
| XM_068632 | 4200451 | 0.000873 | NM_006901 | 7150634 | 0.000283864 |
| NM_015721 | 4200538 | 0.000584 | NM_001152 | 7550537 | 0.000157677 |
| NM_024600 | 4210647 | 0.000148 | | | |
| NM_183384 | 4280047 | 0.000803 | | | |
| NM_020414 | 4280332 | 0.000117 | | | |
| NM_015651 | 4540082 | 0.000304 | | | |
| BC016972 | 4540088 | 0.000796 | | | |
| NM_015433 | 4540301 | 0.000711 | | | |
| AI433683 | 4560463 | 0.000705 | | | |
| NM_138931 | 4640044 | 0.000713 | | | |
| AK055286 | 4640369 | 0.0007 | | | |
| NM_025228 | 4640528 | 0.000891 | | | |
| CR603222 | 4730088 | 0.000941 | | | |
| NM_003543 | 4730195 | 0.000236 | | | |
| NM_001017404 | 4760364 | 0.00038 | | | |
| NM_016553 | 4760543 | 4.28E−05 | | | |
| NM_006725 | 4850192 | 0.000318 | | | |
| NM_021809 | 4850438 | 0.000722 | | | |
| NM_016552 | 4850541 | 0.000256 | | | |
| NM_015239 | 4860132 | 0.000443 | | | |
| NM_014281 | 4900053 | 9.51E−05 | | | |
| NM_018079 | 5080056 | 0.0007 | | | |
| NM_003559 | 5090477 | 0.00056 | | | |
| AA431917 | 5130154 | 0.00036 | | | |
| NM_005902 | 5130767 | 0.000572 | | | |
| XM_941161 | 5270689 | 0.000583 | | | |
| NM_032312 | 5290289 | 0.000232 | | | |
| DB081324 | 5290291 | 0.000823 | | | |
| NM_001007239 | 5310754 | 0.000388 | | | |
| NM_003906 | 5390131 | 0.000811 | | | |
| NM_006321 | 5390669 | 0.000576 | | | |
| NM_152272 | 5550746 | 0.000894 | | | |
| NM_013270 | 5690037 | 5.68E−05 | | | |
| NM_032118 | 5700403 | 0.000329 | | | |
| BU733214 | 5860196 | 0.000752 | | | |
| NM_021052 | 5860400 | 0.000785 | | | |
| NM_006082 | 5900156 | 0.000438 | | | |
| NM_178510 | 5910091 | 0.000459 | | | |
| NM_003415 | 6020132 | 0.000835 | | | |
| NM_014230 | 6020402 | 0.000743 | | | |
| NM_003645 | 6110328 | 0.000347 | | | |
| NM_004044 | 6110768 | 0.000153 | | | |
| NM_005968 | 6270021 | 0.000656 | | | |
| NM_000074 | 6270128 | 0.000174 | | | |
| NM_002964 | 6280576 | 0.000386 | | | |
| NM_001039508 | 6280754 | 0.000586 | | | |
| XM_936128 | 6290561 | 0.00059 | | | |
| NM_033416 | 6380598 | 0.000425 | | | |
| NM_001040107 | 6400563 | 0.000633 | | | |
| AK128384 | 6420541 | 0.000366 | | | |
| NM_001005332 | 6480170 | 0.000873 | | | |
| NM_033554 | 6480500 | 0.000209 | | | |
| NM_024619 | 6590386 | 0.000208 | | | |
| NM_001007224 | 6590523 | 0.000785 | | | |
| AA576740 | 6840408 | 0.000455 | | | |
| NM_018384 | 6960746 | 0.000158 | | | |
| NM_004776 | 6980070 | 0.000353 | | | |
| NM_138576 | 7000133 | 0.000571 | | | |
| NM_025263 | 7000408 | 0.000678 | | | |
| NM_017773 | 7000768 | 0.000871 | | | |
| NM_182476 | 7050543 | 0.000265 | | | |
| NM_078483 | 7100136 | 0.000348 | | | |
| NM_017481 | 7100392 | 0.000469 | | | |
| NM_006901 | 7150634 | 0.000566 | | | |
| NM_014976 | 7160296 | 0.000616 | | | |
| AW263210 | 7200477 | 0.000483 | | | |
| NM_002566 | 7330487 | 0.000789 | | | |
| NM_016237 | 7380288 | 0.000652 | | | |
| NM_001152 | 7550537 | 0.000125 | | | |
| NM_001313 | 7650458 | 0.000741 | | | |

| | |
|---|---|
| List 42 | List 43 |

| AUC | | 0.8 | | | 0.83 |
|---|---|---|---|---|---|
| Number of | | 179 | | | 235 |
| Transcripts | | | | | |
| Acc.-No. | Probe ID | p-Value | Acc.-No. | Probe ID | p-Value |
| NM_177972 | 10142 | 0.001455775 | NM_177972 | 10142 | 0.001205516 |
| NM_023003 | 10541 | 0.001509385 | NM_023003 | 10541 | 0.000994411 |
| NM_015062 | 20647 | 0.001282411 | NM_145799 | 20154 | 0.001201106 |
| NR_002196 | 50347 | 0.001048941 | NM_015062 | 20647 | 0.000290214 |
| NM_001005920 | 60328 | 0.001590938 | NM_052901 | 130113 | 0.001702288 |
| NM_006567 | 130403 | 0.001951351 | NM_006567 | 130403 | 0.001900395 |
| NM_182898 | 160132 | 0.000250783 | NM_021078 | 130451 | 0.001449391 |
| NM_012426 | 160682 | 0.001499205 | NM_022136 | 150632 | 0.000985415 |
| NM_016292 | 160736 | 0.001811398 | NM_182898 | 160132 | 0.000336575 |
| NM_002348 | 450037 | 0.000324895 | XM_933240 | 160202 | 0.000855747 |
| NM_194260 | 460273 | 0.000300085 | NM_012426 | 160682 | 0.001132496 |
| NM_021872 | 460754 | 0.001970943 | NM_016292 | 160736 | 0.000823789 |
| NM_018715 | 510450 | 9.61E−05 | BM981444 | 240653 | 0.000329936 |
| NM_000155 | 520332 | 0.000227815 | NM_014767 | 270341 | 0.001153057 |
| NM_016616 | 580050 | 0.001820349 | NM_013378 | 360066 | 0.00185082 |
| NM_002129 | 610563 | 0.000745793 | NM_005103 | 360343 | 0.000565315 |
| NM_002896 | 620722 | 0.001367871 | NM_022830 | 360402 | 0.0015493 |
| NM_000896 | 650164 | 0.000218568 | NM_015953 | 380685 | 0.001028314 |
| CR596519 | 670041 | 0.000555537 | NM_002348 | 450037 | 0.000342948 |
| NM_016524 | 730725 | 0.001960238 | NM_016025 | 460142 | 0.001033844 |
| XR_015582 | 770452 | 0.001367101 | NM_194260 | 460273 | 0.000767067 |
| NM_199337 | 840730 | 0.001996372 | NM_021872 | 460754 | 0.00069976 |
| NM_012252 | 990377 | 0.001966311 | NM_018715 | 510450 | 0.000130559 |
| AF272739 | 1050128 | 0.000586303 | NM_000155 | 520332 | 2.35E−05 |
| NM_024949 | 1070348 | 0.001834797 | NM_002129 | 610563 | 0.000374121 |
| NM_207107 | 1070377 | 0.001852816 | NM_002896 | 620722 | 0.001603312 |
| NM_015292 | 1110215 | 0.000501175 | NM_000896 | 650164 | 0.000149638 |
| NM_006720 | 1110575 | 0.001923291 | CR596519 | 670041 | 0.000147409 |
| NM_000887 | 1240603 | 0.000255241 | CA432760 | 730397 | 0.001748612 |
| NM_021105 | 1260228 | 0.000813953 | NM_016524 | 730725 | 0.001501236 |
| XM_377476 | 1340338 | 0.00195378 | NM_012252 | 990377 | 0.001576745 |
| NM_016286 | 1410369 | 0.00051991 | NM_021209 | 1030041 | 0.001669455 |
| NM_000578 | 1430292 | 0.00058391 | AF272739 | 1050128 | 0.000152295 |
| NM_007199 | 1430762 | 0.001161483 | NM_015292 | 1110215 | 0.000149721 |
| NM_003343 | 1440382 | 0.001824632 | NM_006720 | 1110575 | 0.000762316 |
| NM_016408 | 1440601 | 0.000900231 | NM_000878 | 1170307 | 0.00010424 |
| NM_001037325 | 1470332 | 0.00087564 | NM_000887 | 1240603 | 0.000196853 |
| NM_015039 | 1580348 | 0.000158009 | NM_021105 | 1260228 | 0.000594326 |
| BX101820 | 1690504 | 0.000106674 | XM_377476 | 1340338 | 0.001889526 |
| NM_002405 | 1710286 | 0.000137385 | NM_001039708 | 1340731 | 0.00168399 |
| NM_018285 | 1780348 | 0.000256512 | NM_000578 | 1430292 | 0.000702443 |
| NM_001099786 | 1820598 | 0.00041803 | NM_007199 | 1430762 | 0.000974164 |
| NM_019053 | 1940543 | 0.001551335 | NM_001716 | 1440291 | 0.001369031 |
| NM_024108 | 1980424 | 0.00157856 | NM_002080 | 1440546 | 0.001300066 |
| NM_005184 | 1990762 | 0.001396592 | NM_016408 | 1440601 | 0.000951667 |
| NM_012395 | 2000390 | 0.000424974 | NM_198578 | 1450523 | 0.001983745 |
| NM_001040138 | 2000551 | 0.001316344 | NM_006306 | 1500040 | 0.001896817 |
| NM_004226 | 2100035 | 0.000858826 | NM_000314 | 1500717 | 0.001298645 |
| NM_017758 | 2100221 | 0.000121456 | NM_015039 | 1580348 | 0.00011162 |
| CK299581 | 2120356 | 0.000302925 | NM_153201 | 1690189 | 0.001949371 |
| NM_014738 | 2190673 | 0.000184581 | NM_002405 | 1710286 | 0.000679139 |
| XM_935843 | 2260446 | 0.000153083 | NM_018285 | 1780348 | 0.000315017 |
| NM_007115 | 2370524 | 3.72E−06 | NM_001099786 | 1820598 | 0.000486241 |
| BQ372445 | 2370681 | 0.000583714 | NM_019053 | 1940543 | 0.00145107 |
| AI217168 | 2450039 | 0.00159536 | NM_024108 | 1980424 | 0.000769832 |
| BX096685 | 2450343 | 0.001623928 | NM_012395 | 2000390 | 0.001426973 |
| T03068 | 2450497 | 0.000720837 | BM272556 | 2000474 | 0.000743311 |
| NM_181803 | 2450603 | 0.000989016 | NM_012155 | 2030450 | 0.00150662 |
| NM_031412 | 2630154 | 0.001573117 | XM_936353 | 2030544 | 0.001713621 |
| NM_020408 | 2630181 | 0.001285023 | NM_153211 | 2070241 | 0.001855622 |
| NM_003528 | 2630451 | 0.000936813 | NM_004226 | 2100035 | 0.000361256 |
| NM_025153 | 2630484 | 0.000144774 | NM_198196 | 2100333 | 0.000214022 |
| NM_005980 | 2640609 | 0.000930504 | NM_014738 | 2190673 | 0.000170793 |
| NM_001014838 | 2690609 | 0.000645403 | NM_005356 | 2230661 | 0.001037064 |
| NM_001854 | 2750070 | 0.000658161 | XM_935843 | 2260446 | 0.000146988 |
| NM_003707 | 2750408 | 0.00087014 | NM_007115 | 2370524 | 5.38E−06 |
| NM_001384 | 2900524 | 0.001359091 | BX096685 | 2450343 | 0.001065272 |
| NM_031488 | 3120301 | 0.000157583 | T03068 | 2450497 | 0.000187261 |
| NM_017905 | 3130091 | 0.001142323 | NM_181803 | 2450603 | 0.001592676 |
| NM_004555 | 3130291 | 0.001591589 | NM_003864 | 2510133 | 0.001559663 |
| NM_016230 | 3140039 | 0.001651147 | NM_003528 | 2630451 | 0.000474784 |
| NM_205548 | 3140088 | 0.00050659 | NM_025153 | 2630484 | 4.79E−05 |
| NM_006767 | 3140093 | 0.001209303 | NM_005937 | 2630719 | 0.001161538 |
| NM_033111 | 3140246 | 0.000989192 | NM_001004486 | 2650435 | 0.000736149 |
| NM_015710 | 3170092 | 0.001022851 | NM_019111 | 2680370 | 0.000879629 |
| CB046255 | 3310075 | 0.000366533 | NM_001014838 | 2690609 | 0.000385489 |
| BI260057 | 3310341 | 0.000518393 | NM_003059 | 2710397 | 0.000617745 |
| NM_014941 | 3360364 | 4.61E−05 | NM_001854 | 2750070 | 0.001698008 |
| NM_005698 | 3370687 | 0.000458431 | NM_003707 | 2750408 | 0.001506297 |
| NM_015288 | 3420735 | 0.001555312 | NM_005449 | 2760092 | 0.000716486 |
| NM_012110 | 3440431 | 0.001983618 | NM_017917 | 2760110 | 0.001751093 |
| NM_139244 | 3460189 | 0.001215325 | NM_001414 | 2760563 | 0.000392459 |
| NM_003137 | 3460674 | 0.000140303 | NM_014675 | 2970440 | 0.001409012 |
| NM_213566 | 3520192 | 0.000898773 | NM_031488 | 3120301 | 7.69E−05 |
| NM_005476 | 3610504 | 0.000257877 | NM_017905 | 3130091 | 0.00050347 |
| NM_002883 | 3710189 | 0.001487804 | NM_004555 | 3130291 | 0.000432943 |
| NM_018129 | 3780220 | 0.00176732 | NM_020750 | 3130711 | 0.001688086 |
| XM_943902 | 3800382 | 0.001606194 | NM_016230 | 3140039 | 0.001128807 |
| NM_004092 | 3840022 | 0.000494857 | NM_006767 | 3140093 | 0.000793272 |
| NM_024326 | 3930687 | 0.001644948 | NM_033111 | 3140246 | 0.001124347 |
| X00437 | 3990639 | 0.000336428 | NM_015710 | 3170092 | 0.000556457 |
| BM668555 | 4050270 | 0.001618552 | NM_198397 | 3290433 | 0.001315615 |
| NM_153329 | 4050411 | 0.001925397 | NM_014941 | 3360364 | 0.00014666 |
| NM_004811 | 4060131 | 0.001071434 | NM_005698 | 3370687 | 0.000691938 |
| NM_001779 | 4150161 | 0.001026744 | NM_003475 | 3390008 | 0.001166907 |
| AA868051 | 4150402 | 0.000261699 | NM_000884 | 3400504 | 0.001521663 |
| NM_002756 | 4150632 | 0.001355827 | NM_207311 | 3420343 | 0.001358147 |
| XM_378421 | 4200148 | 0.001375051 | NM_001042600 | 3420630 | 0.001751811 |
| NM_015721 | 4200538 | 0.001048016 | NM_015722 | 3420682 | 0.001958483 |
| NM_024600 | 4210647 | 0.001183759 | NM_015288 | 3420735 | 0.000197646 |
| NM_001042631 | 4220138 | 0.000866129 | NM_012110 | 3440431 | 0.001902524 |
| AI863525 | 4230520 | 0.000273914 | NM_139244 | 3460189 | 0.000564028 |
| NM_139247 | 4230653 | 0.000972849 | NM_024430 | 3460523 | 0.000680886 |
| NM_183384 | 4280047 | 0.000834238 | NM_003137 | 3460674 | 0.00015086 |
| NM_020414 | 4280332 | 0.000423393 | NM_003707 | 3520082 | 0.000716187 |
| NM_015651 | 4540082 | 0.000308128 | NM_213566 | 3520192 | 0.000105064 |
| NM_015433 | 4540301 | 0.000650852 | NM_005476 | 3610504 | 0.001872286 |
| AI433683 | 4560463 | 0.000983865 | NM_002883 | 3710189 | 0.001569979 |
| NM_138931 | 4640044 | 0.001309072 | NM_001002010 | 3780689 | 0.000967825 |
| DA122577 | 4670259 | 0.001993396 | NM_000648 | 3800270 | 0.001318335 |
| NM_003543 | 4730195 | 0.000340803 | XM_930898 | 3830390 | 0.000160792 |
| CK300859 | 4730577 | 0.00010617 | NM_004092 | 3840022 | 0.000609434 |
| NM_016553 | 4760543 | 2.55E−05 | NM_139353 | 3850025 | 0.001493499 |
| NM_030811 | 4830435 | 0.001748283 | CF887308 | 3940020 | 0.001195029 |
| NM_006725 | 4850192 | 0.000946757 | XM_940524 | 3940368 | 0.000419906 |
| NM_016552 | 4850541 | 0.000256939 | NM_080387 | 3990328 | 0.001779697 |
| NM_032320 | 4860296 | 0.00121432 | XM_496059 | 3990465 | 0.000614594 |
| BX096603 | 4880373 | 0.000369008 | X00437 | 3990639 | 0.000234692 |
| NM_014281 | 4900053 | 1.89E−05 | NM_002635 | 4050398 | 0.00105853 |
| BM669760 | 4900497 | 0.00193133 | NM_004811 | 4060131 | 0.000831301 |
| NM_018079 | 5080056 | 0.001049521 | NM_022827 | 4120133 | 0.000504567 |
| NM_015702 | 5090204 | 0.000413861 | NM_001779 | 4150161 | 0.000419842 |
| NM_003559 | 5090477 | 0.000740219 | AA868051 | 4150402 | 0.000207276 |
| AA431917 | 5130154 | 0.001306591 | NM_002756 | 4150632 | 0.000469327 |
| NM_003853 | 5130475 | 0.001765236 | XM_378421 | 4200148 | 0.001019252 |
| NM_032312 | 5290289 | 0.000641347 | XM_068632 | 4200451 | 0.0008735 |
| NM_022730 | 5310050 | 0.001909285 | NM_015721 | 4200538 | 0.000584201 |
| NM_001007239 | 5310754 | 0.000922676 | NM_024600 | 4210647 | 0.000147792 |
| NM_003906 | 5390131 | 0.00049562 | NM_001042631 | 4220138 | 0.001022931 |
| NM_013270 | 5690037 | 0.000251306 | NM_183384 | 4280047 | 0.000803349 |
| NM_032118 | 5700403 | 0.000798036 | AI745611 | 4280068 | 0.00164308 |
| XR_000589 | 5810465 | 0.001969496 | NM_020414 | 4280332 | 0.000117208 |
| BU733214 | 5860196 | 0.000367358 | XR_017960 | 4490224 | 0.001830753 |
| NM_006082 | 5900156 | 0.000222424 | NM_015651 | 4540082 | 0.000304396 |
| NM_178510 | 5910091 | 0.000822308 | BC016972 | 4540088 | 0.000795764 |
| NM_170699 | 5960035 | 0.000233217 | NM_015433 | 4540301 | 0.000710743 |
| NM_003415 | 6020132 | 0.001267767 | AI433683 | 4560463 | 0.000705494 |
| NM_004833 | 6040639 | 0.001695946 | NM_138931 | 4640044 | 0.000713445 |
| NM_181786 | 6060133 | 0.00162644 | AK055286 | 4640369 | 0.000699528 |
| NM_007255 | 6100220 | 0.000779956 | NM_025228 | 4640528 | 0.00089107 |
| NM_007365 | 6110133 | 0.001213074 | CR603222 | 4730088 | 0.000941409 |
| XM_931928 | 6110537 | 0.001296279 | NM_003543 | 4730195 | 0.000235721 |
| NM_004044 | 6110768 | 0.000384684 | CK300859 | 4730577 | 0.001100674 |
| NM_000074 | 6270128 | 8.15E−05 | NM_001017404 | 4760364 | 0.000380432 |
| NM_002964 | 6280576 | 0.001046577 | NM_016553 | 4760543 | 4.28E−05 |
| AL157484 | 6280682 | 0.000692263 | BX505043 | 4780386 | 0.001514465 |
| NM_001039508 | 6280754 | 0.000859212 | NM_005243 | 4780743 | 0.001281728 |
| NM_003755 | 6290431 | 0.001811343 | NM_006725 | 4850192 | 0.000317824 |
| XM_936128 | 6290561 | 0.001923956 | NM_021809 | 4850438 | 0.000722439 |
| NM_021729 | 6330634 | 0.001320036 | NM_016552 | 4850541 | 0.000255862 |
| NM_005176 | 6350360 | 0.000972125 | NM_015239 | 4860132 | 0.00044276 |
| XM_001133111 | 6370463 | 0.000949474 | NM_032320 | 4860296 | 0.001183736 |
| NM_033416 | 6380598 | 0.00049647 | NM_024092 | 4880364 | 0.00185419 |
| NM_001040107 | 6400563 | 0.000184244 | NM_014281 | 4900053 | 9.51E−05 |
| NM_025150 | 6480328 | 0.001837392 | NM_018079 | 5080056 | 0.000700252 |
| NM_033554 | 6480500 | 0.001722237 | NM_015702 | 5090204 | 0.001582017 |
| NM_020679 | 6520241 | 0.001034378 | NM_003559 | 5090477 | 0.000560435 |
| XR_018793 | 6550142 | 0.001141491 | AA431917 | 5130154 | 0.000360375 |
| NM_024619 | 6590386 | 0.000143395 | NM_003221 | 5130553 | 0.001273633 |
| CA436726 | 6620102 | 0.001192211 | NM_005902 | 5130767 | 0.000571789 |
| NM_030911 | 6660671 | 0.00081986 | NM_000075 | 5270500 | 0.001835783 |
| BX110808 | 6770491 | 0.000657189 | XM_941161 | 5270689 | 0.000583152 |
| NM_004964 | 6940242 | 0.000592208 | NM_032312 | 5290289 | 0.000231901 |
| NM_018384 | 6960746 | 0.000336644 | DB081324 | 5290291 | 0.000823148 |
| NM_004776 | 6980070 | 0.000192696 | NM_022730 | 5310050 | 0.001869828 |
| NM_178839 | 6980609 | 0.00024765 | NM_001007239 | 5310754 | 0.000388228 |
| NM_182476 | 7050543 | 0.001998652 | NM_003906 | 5390131 | 0.000810601 |
| NM_078483 | 7100136 | 0.000161958 | NM_006321 | 5390669 | 0.000575519 |
| NM_006429 | 7150017 | 0.000353009 | NM_152272 | 5550746 | 0.000893729 |
| NM_006901 | 7150634 | 0.000568867 | NM_006790 | 5670039 | 0.001231623 |
| NM_014976 | 7160296 | 0.001140352 | NM_005500 | 5690008 | 0.001570626 |
| NM_001008269 | 7320100 | 0.000501803 | NM_013270 | 5690037 | 5.68E−05 |
| NM_002566 | 7330487 | 0.00076861 | NM_032118 | 5700403 | 0.000328534 |
| NM_007167 | 7380274 | 0.001266876 | NM_173791 | 5720398 | 0.001146565 |
| NM_016237 | 7380288 | 0.000728709 | NM_017570 | 5820348 | 0.001014231 |
| NM_001037161 | 7510224 | 0.001607632 | BU733214 | 5860196 | 0.000751778 |
| NM_001003722 | 7510369 | 0.001718796 | NM_021052 | 5860400 | 0.000785259 |
| NM_001152 | 7550537 | 0.00016679 | BM974838 | 5870300 | 0.001818853 |
| NM_024422 | 7650025 | 0.001466782 | NM_001628 | 5890327 | 0.001763401 |
| | | | NM_006082 | 5900156 | 0.000437807 |
| | | | NM_178510 | 5910091 | 0.000458692 |
| | | | NM_170699 | 5960035 | 0.001612667 |
| | | | NM_003415 | 6020132 | 0.000834508 |
| | | | NM_014230 | 6020402 | 0.000743313 |
| | | | NM_032839 | 6020575 | 0.001112521 |
| | | | NM_007255 | 6100220 | 0.001551483 |
| | | | NM_023926 | 6110291 | 0.001410392 |
| | | | NM_003645 | 6110328 | 0.000347124 |
| | | | XM_931928 | 6110537 | 0.001038214 |
| | | | NM_004044 | 6110768 | 0.000153478 |
| | | | NM_146388 | 6250367 | 0.001571306 |
| | | | NM_005968 | 6270021 | 0.000656292 |
| | | | NM_000074 | 6270128 | 0.000174489 |
| | | | NM_002964 | 6280576 | 0.00038563 |
| | | | NM_001039508 | 6280754 | 0.000586113 |
| | | | NM_003755 | 6290431 | 0.00138378 |
| | | | XM_936128 | 6290561 | 0.000589939 |
| | | | NM_033416 | 6380598 | 0.000424599 |
| | | | NM_001040107 | 6400563 | 0.000632811 |
| | | | AK128384 | 6420541 | 0.000366212 |
| | | | NM_001005332 | 6480170 | 0.000872739 |
| | | | NM_033554 | 6480500 | 0.000208647 |
| | | | XR_018793 | 6550142 | 0.00134571 |
| | | | NM_006164 | 6580075 | 0.001946183 |
| | | | NM_024619 | 6590386 | 0.000207786 |
| | | | NM_001007224 | 6590523 | 0.000784655 |
| | | | NM_000632 | 6660709 | 0.001859075 |
| | | | NM_006825 | 6770348 | 0.001569187 |
| | | | AA576740 | 6840408 | 0.000454974 |
| | | | NM_001024401 | 6900348 | 0.001037245 |
| | | | NM_004964 | 6940242 | 0.001770056 |
| | | | NM_001033515 | 6960328 | 0.001773863 |
| | | | NM_018384 | 6960746 | 0.000157737 |
| | | | NM_004776 | 6980070 | 0.000352936 |
| | | | BI915661 | 6980274 | 0.001511178 |
| | | | NM_138576 | 7000133 | 0.000570876 |
| | | | NM_025263 | 7000408 | 0.00067838 |
| | | | NM_017773 | 7000768 | 0.000871131 |
| | | | NM_182476 | 7050543 | 0.000265389 |
| | | | NM_078483 | 7100136 | 0.000347929 |
| | | | NM_017481 | 7100392 | 0.000469408 |
| | | | NM_006429 | 7150017 | 0.001241951 |
| | | | NM_014165 | 7150601 | 0.001386685 |
| | | | NM_006901 | 7150634 | 0.000566389 |
| | | | NM_014976 | 7160296 | 0.000615809 |
| | | | NM_005020 | 7200224 | 0.001851926 |
| | | | AW263210 | 7200477 | 0.000483002 |
| | | | NM_003757 | 7320576 | 0.001440481 |
| | | | NM_002566 | 7330487 | 0.000789279 |
| | | | NM_001005203 | 7380209 | 0.001686087 |
| | | | NM_007167 | 7380274 | 0.00195808 |
| | | | NM_016237 | 7380288 | 0.000652014 |
| | | | NM_001152 | 7550537 | 0.000125031 |
| | | | NM_024422 | 7650025 | 0.001180182 |
| | | | NM_001313 | 7650458 | 0.000740865 |

| | |
|---|---|
| List 44 | List 45 |

| AUC | | 0.83 | | | 0.8 |
|---|---|---|---|---|---|
| Number of | | 142 | | | 274 |
| Transcripts | | | | | |
| Acc.-No. | Probe ID | p-Value | Acc.-No. | Probe ID | p-Value |
| NM_023003 | 10541 | 0.001154 | NM_177972 | 10142 | 0.001456 |
| NM_006152 | 20553 | 0.001572 | NM_001031717 | 10338 | 0.002688 |
| NM_015062 | 20647 | 0.001034 | NM_023003 | 10541 | 0.001509 |
| XM_001129663 | 130288 | 0.000968 | NM_006152 | 20553 | 0.002204 |
| NM_022136 | 150632 | 0.001841 | NM_015062 | 20647 | 0.001282 |
| AF086457 | 150711 | 0.000995 | NM_006369 | 50240 | 0.002043 |
| XM_932547 | 160121 | 0.000544 | NR_002196 | 50347 | 0.001049 |
| NM_182898 | 160132 | 0.001608 | NM_001005920 | 60328 | 0.001591 |
| NM_015953 | 380685 | 0.001852 | NM_006567 | 130403 | 0.001951 |
| NM_012212 | 430100 | 0.000976 | NM_022136 | 150632 | 0.002125 |
| NM_002348 | 450037 | 0.000351 | NM_182898 | 160132 | 0.000251 |
| NM_018715 | 510450 | 0.000153 | NM_012426 | 160682 | 0.001499 |
| NM_000155 | 520332 | 0.000379 | NM_016292 | 160736 | 0.001811 |
| NM_002129 | 610563 | 0.001672 | BM981444 | 240653 | 0.002952 |
| AW852357 | 610615 | 0.001548 | NM_013378 | 360066 | 0.002782 |
| NM_001039548 | 620215 | 0.001881 | NM_005103 | 360343 | 0.002696 |
| NM_002896 | 620722 | 0.001524 | XM_929457 | 380762 | 0.002276 |
| NM_000896 | 650164 | 4.19E−05 | NM_002348 | 450037 | 0.000325 |
| CR596519 | 670041 | 0.000321 | NM_194260 | 460273 | 0.0003 |
| XR_015582 | 770452 | 0.000289 | NM_021872 | 460754 | 0.001971 |
| XM_938718 | 870750 | 0.001841 | NM_018715 | 510450 | 9.61E−05 |
| XM_939144 | 940706 | 0.001055 | NM_000155 | 520332 | 0.000228 |
| AW451403 | 1030270 | 0.001433 | NM_016616 | 580050 | 0.00182 |
| AI311332 | 1030600 | 0.001247 | NM_002129 | 610563 | 0.000746 |
| AF272739 | 1050128 | 8.83E−05 | NM_004928 | 610653 | 0.002308 |
| NM_015292 | 1110215 | 0.000717 | NM_002896 | 620722 | 0.001368 |
| BC041984 | 1110358 | 0.001264 | NM_000896 | 650164 | 0.000219 |
| NM_003793 | 1110538 | 0.001911 | NM_002727 | 650541 | 0.002564 |
| NM_000887 | 1240603 | 0.000605 | CR596519 | 670041 | 0.000556 |
| NM_000578 | 1430292 | 0.00066 | NM_001517 | 730543 | 0.00241 |
| NM_003343 | 1440382 | 0.0011 | NM_016524 | 730725 | 0.00196 |
| NM_001037325 | 1470332 | 0.000893 | XR_015582 | 770452 | 0.001367 |
| CB240909 | 1470372 | 0.00138 | NM_001398 | 770458 | 0.002653 |
| NM_015039 | 1580348 | 0.000316 | CA429313 | 840139 | 0.002331 |
| NM_018285 | 1780348 | 0.001088 | NM_199337 | 840730 | 0.001996 |
| NM_001099786 | 1820598 | 0.000518 | NM_015380 | 990273 | 0.002688 |
| NM_012395 | 2000390 | 0.001032 | NM_012252 | 990377 | 0.001966 |
| BM272556 | 2000474 | 0.001239 | AA335815 | 1010671 | 0.002966 |
| XM_936353 | 2030544 | 0.000513 | AF272739 | 1050128 | 0.000586 |
| NM_001013651 | 2060338 | 0.001442 | NM_006608 | 1070189 | 0.00296 |
| AA910733 | 2070452 | 0.000848 | NM_024949 | 1070348 | 0.001835 |
| NM_004226 | 2100035 | 0.001599 | NM_207107 | 1070377 | 0.001853 |
| CK299581 | 2120356 | 0.000628 | NM_153611 | 1090048 | 0.002929 |
| XM_935843 | 2260446 | 0.000632 | NM_016464 | 1090139 | 0.002779 |
| XM_932015 | 2370341 | 0.001837 | NM_015292 | 1110215 | 0.000501 |
| NM_007115 | 2370524 | 2.66E−05 | BC041984 | 1110358 | 0.002383 |
| BX096685 | 2450343 | 0.001304 | NM_003793 | 1110538 | 0.002744 |
| T03068 | 2450497 | 9.16E−05 | NM_006720 | 1110575 | 0.001923 |
| NM_031412 | 2630154 | 0.000461 | NM_006576 | 1240070 | 0.002371 |
| NM_003528 | 2630451 | 0.000164 | NM_000887 | 1240603 | 0.000255 |
| NM_025153 | 2630484 | 5.73E−06 | NM_021105 | 1260228 | 0.000814 |
| NM_005980 | 2640609 | 0.001492 | XM_377476 | 1340338 | 0.001954 |
| NM_019111 | 2680370 | 0.001629 | NM_016286 | 1410369 | 0.00052 |
| NM_001014838 | 2690609 | 0.001107 | NM_000578 | 1430292 | 0.000584 |
| NM_001414 | 2760563 | 0.001875 | NM_007199 | 1430762 | 0.001161 |
| BG188859 | 2810630 | 0.001682 | NM_003343 | 1440382 | 0.001825 |
| XM_001126803 | 2850274 | 0.001641 | NM_002080 | 1440546 | 0.002679 |
| NM_031488 | 3120301 | 0.000356 | NM_016408 | 1440601 | 0.0009 |
| NM_020925 | 3140142 | 0.00138 | NM_001686 | 1450706 | 0.002817 |
| BX111143 | 3180440 | 0.001248 | NM_001037325 | 1470332 | 0.000876 |
| NM_014941 | 3360364 | 0.000257 | CB240909 | 1470372 | 0.002717 |
| XM_001126287 | 3440040 | 0.001018 | NM_003855 | 1500328 | 0.002353 |
| NM_139244 | 3460189 | 0.000544 | NM_015039 | 1580348 | 0.000158 |
| NM_003137 | 3460674 | 0.000329 | BX101820 | 1690504 | 0.000107 |
| NM_003707 | 3520082 | 0.000548 | NM_002405 | 1710286 | 0.000137 |
| NM_213566 | 3520192 | 0.000494 | NM_003375 | 1770379 | 0.002947 |
| NM_005476 | 3610504 | 0.00042 | NM_018285 | 1780348 | 0.000257 |
| NM_000648 | 3800270 | 0.000658 | NM_001099786 | 1820598 | 0.000418 |
| XM_930898 | 3830390 | 9.69E−05 | NM_019053 | 1940543 | 0.001551 |
| BU729036 | 3850367 | 0.000728 | NM_016839 | 1980092 | 0.002857 |
| XM_940524 | 3940368 | 0.000574 | NM_024108 | 1980424 | 0.001579 |
| XM_496059 | 3990465 | 0.001402 | NM_005184 | 1990762 | 0.001397 |
| X00437 | 3990639 | 0.000503 | NM_012395 | 2000390 | 0.000425 |
| NM_022827 | 4120133 | 0.001575 | NM_001040138 | 2000551 | 0.001316 |
| AA868051 | 4150402 | 0.001528 | NM_012155 | 2030450 | 0.002936 |
| NM_024600 | 4210647 | 0.001538 | XM_936353 | 2030544 | 0.002128 |
| NM_001042631 | 4220138 | 0.000983 | NM_175887 | 2070201 | 0.002794 |
| NM_139247 | 4230653 | 0.000805 | NM_004226 | 2100035 | 0.000859 |
| NM_020414 | 4280332 | 0.000499 | NM_017758 | 2100221 | 0.000121 |
| NM_015651 | 4540082 | 0.001064 | NM_006469 | 2100519 | 0.002129 |
| AI433683 | 4560463 | 0.000717 | CK299581 | 2120356 | 0.000303 |
| XM_942378 | 4590400 | 0.001671 | NM_207111 | 2190524 | 0.002054 |
| NM_003543 | 4730195 | 7.59E−05 | NM_014738 | 2190673 | 0.000185 |
| CK300859 | 4730577 | 0.000937 | AI537683 | 2230594 | 0.002292 |
| NM_016553 | 4760543 | 0.000244 | XM_935843 | 2260446 | 0.000153 |
| NM_012321 | 4830563 | 0.001969 | XM_932015 | 2370341 | 0.002144 |
| NM_006725 | 4850192 | 0.001494 | NM_007115 | 2370524 | 3.72E−06 |
| XM_936107 | 4850241 | 0.001146 | BQ372445 | 2370681 | 0.000584 |
| NM_016552 | 4850541 | 0.00067 | AI217168 | 2450039 | 0.001595 |
| NM_014281 | 4900053 | 0.000355 | BX096685 | 2450343 | 0.001624 |
| NM_003559 | 5090477 | 0.00048 | T03068 | 2450497 | 0.000721 |
| NM_002150 | 5090554 | 0.000387 | NM_181803 | 2450603 | 0.000989 |
| AA765688 | 5090647 | 0.00087 | NM_031412 | 2630154 | 0.001573 |
| CD243631 | 5270450 | 0.000608 | NM_020408 | 2630181 | 0.001285 |
| NM_000075 | 5270500 | 0.001944 | NM_003528 | 2630451 | 0.000937 |
| NM_032312 | 5290289 | 0.001788 | NM_025153 | 2630484 | 0.000145 |
| NM_012387 | 5310653 | 0.001357 | NM_005937 | 2630719 | 0.002777 |
| NM_003906 | 5390131 | 0.001975 | NM_005980 | 2640609 | 0.000931 |
| NM_006321 | 5390669 | 0.000818 | NM_001014838 | 2690609 | 0.000645 |
| BX113537 | 5550270 | 0.001739 | NM_003059 | 2710397 | 0.002168 |
| NM_152272 | 5550746 | 0.001593 | NM_000477 | 2710427 | 0.002062 |
| NM_013270 | 5690037 | 0.000449 | NM_001018062 | 2750035 | 0.002623 |
| NM_032118 | 5700403 | 0.001594 | NM_001854 | 2750070 | 0.000658 |
| NM_002808 | 5720497 | 0.000366 | NM_003707 | 2750408 | 0.00087 |
| NM_017570 | 5820348 | 0.001129 | NM_005082 | 2850576 | 0.002305 |
| BU733214 | 5860196 | 0.000376 | NM_001384 | 2900524 | 0.001359 |
| NM_021052 | 5860400 | 0.000553 | NM_003553 | 2940053 | 0.002948 |
| BM974838 | 5870300 | 0.000467 | NM_032491 | 3120181 | 0.00276 |
| NM_006082 | 5900156 | 0.000428 | NM_031488 | 3120301 | 0.000158 |
| NM_005548 | 5900414 | 0.001635 | NM_017905 | 3130091 | 0.001142 |
| NM_178510 | 5910091 | 0.001985 | NM_004555 | 3130291 | 0.001592 |
| XM_001131964 | 5910343 | 0.001426 | NM_016230 | 3140039 | 0.001651 |
| NM_170699 | 5960035 | 0.001112 | NM_205548 | 3140088 | 0.000507 |
| XM_931928 | 6110537 | 0.000484 | NM_006767 | 3140093 | 0.001209 |
| NM_004044 | 6110768 | 0.000594 | NM_020925 | 3140142 | 0.002377 |
| NM_000074 | 6270128 | 0.000132 | NM_033111 | 3140246 | 0.000989 |
| NM_001039508 | 6280754 | 0.001096 | NM_015710 | 3170092 | 0.001023 |
| XM_936128 | 6290561 | 0.001469 | XM_936295 | 3180523 | 0.002392 |
| NM_033416 | 6380598 | 0.000237 | CB046255 | 3310075 | 0.000367 |
| NM_033554 | 6480500 | 0.000848 | BI260057 | 3310341 | 0.000518 |
| AW779539 | 6510452 | 0.001498 | NM_014941 | 3360364 | 4.61E−05 |
| NM_024619 | 6590386 | 0.000849 | NM_020808 | 3370605 | 0.002185 |
| NM_001007224 | 6590523 | 0.001316 | NM_005698 | 3370687 | 0.000458 |
| CB066794 | 6650482 | 0.00196 | NM_003475 | 3390008 | 0.002397 |
| CA424950 | 6650576 | 0.00117 | NM_170736 | 3390458 | 0.002464 |
| M97723 | 6940246 | 0.001888 | NM_015288 | 3420735 | 0.001555 |
| NM_018384 | 6960746 | 0.000361 | XM_001126287 | 3440040 | 0.002183 |
| NM_004776 | 6980070 | 0.000499 | NM_012110 | 3440431 | 0.001984 |
| BI915661 | 6980274 | 0.000463 | NM_139244 | 3460189 | 0.001215 |
| XM_943393 | 7050196 | 0.000729 | NM_024430 | 3460523 | 0.002452 |
| NM_078483 | 7100136 | 0.000439 | NM_003137 | 3460674 | 0.00014 |
| NM_017481 | 7100392 | 0.001519 | NM_003707 | 3520082 | 0.00205 |
| NM_006429 | 7150017 | 0.00141 | NM_213566 | 3520192 | 0.000899 |
| NM_006901 | 7150634 | 0.000284 | NM_005476 | 3610504 | 0.000258 |
| NM_014976 | 7160296 | 0.001192 | NM_002883 | 3710189 | 0.001488 |
| NM_003757 | 7320576 | 0.00123 | NM_018129 | 3780220 | 0.001767 |
| NM_007167 | 7380274 | 0.00159 | NM_001002010 | 3780689 | 0.002077 |
| NM_016237 | 7380288 | 0.001302 | XM_943902 | 3800382 | 0.001606 |
| NM_001923 | 7400121 | 0.001106 | XM_930898 | 3830390 | 0.002862 |
| NM_001152 | 7550537 | 0.000158 | NM_004092 | 3840022 | 0.000495 |
| NM_032717 | 7610546 | 0.001923 | NM_024326 | 3930687 | 0.001645 |
| NM_001313 | 7650458 | 0.001914 | NM_000849 | 3940386 | 0.002075 |
| | | | XM_496059 | 3990465 | 0.002277 |
| | | | X00437 | 3990639 | 0.000336 |
| | | | BM668555 | 4050270 | 0.001619 |
| | | | NM_002635 | 4050398 | 0.002878 |
| | | | NM_153329 | 4050411 | 0.001925 |
| | | | NM_015054 | 4060056 | 0.002765 |
| | | | NM_004811 | 4060131 | 0.001071 |
| | | | NM_030915 | 4120086 | 0.002988 |
| | | | NM_001779 | 4150161 | 0.001027 |
| | | | AA868051 | 4150402 | 0.000262 |
| | | | NM_002756 | 4150632 | 0.001356 |
| | | | NM_016091 | 4180142 | 0.00252 |
| | | | XM_378421 | 4200148 | 0.001375 |
| | | | NM_015721 | 4200538 | 0.001048 |
| | | | NM_024600 | 4210647 | 0.001184 |
| | | | NM_001042631 | 4220138 | 0.000866 |
| | | | NM_002496 | 4220181 | 0.002053 |
| | | | AI863525 | 4230520 | 0.000274 |
| | | | NM_139247 | 4230653 | 0.000973 |
| | | | NM_183384 | 4280047 | 0.000834 |
| | | | NM_020414 | 4280332 | 0.000423 |
| | | | NM_138554 | 4390615 | 0.002746 |
| | | | NM_015651 | 4540082 | 0.000308 |
| | | | BC016972 | 4540088 | 0.002144 |
| | | | NM_015433 | 4540301 | 0.000651 |
| | | | AI433683 | 4560463 | 0.000984 |
| | | | NM_015654 | 4560601 | 0.002683 |
| | | | BU752667 | 4560703 | 0.002272 |
| | | | BX096530 | 4610670 | 0.002723 |
| | | | NM_138931 | 4640044 | 0.001309 |
| | | | DA122577 | 4670259 | 0.001993 |
| | | | NM_003543 | 4730195 | 0.000341 |
| | | | CK300859 | 4730577 | 0.000106 |
| | | | NM_016553 | 4760543 | 2.55E−05 |
| | | | NM_005243 | 4780743 | 0.002978 |
| | | | NM_030811 | 4830435 | 0.001748 |
| | | | NM_006725 | 4850192 | 0.000947 |
| | | | NM_016552 | 4850541 | 0.000257 |
| | | | NM_032320 | 4860296 | 0.001214 |
| | | | BX096603 | 4880373 | 0.000369 |
| | | | NM_014281 | 4900053 | 1.89E−05 |
| | | | BM669760 | 4900497 | 0.001931 |
| | | | NM_018079 | 5080056 | 0.00105 |
| | | | NM_015702 | 5090204 | 0.000414 |
| | | | NM_003559 | 5090477 | 0.00074 |
| | | | NM_007355 | 5130082 | 0.002507 |
| | | | AA431917 | 5130154 | 0.001307 |
| | | | NM_003853 | 5130475 | 0.001765 |
| | | | BU587445 | 5130747 | 0.00211 |
| | | | NM_000075 | 5270500 | 0.002368 |
| | | | NM_032312 | 5290289 | 0.000641 |
| | | | NM_022730 | 5310050 | 0.001909 |
| | | | NM_001033667 | 5310136 | 0.002721 |
| | | | NM_012387 | 5310653 | 0.002029 |
| | | | NM_001007239 | 5310754 | 0.000923 |
| | | | AA668491 | 5360400 | 0.00277 |
| | | | NM_003906 | 5390131 | 0.000496 |
| | | | NM_006321 | 5390669 | 0.002487 |
| | | | NM_152272 | 5550746 | 0.0025 |
| | | | NM_013270 | 5690037 | 0.000251 |
| | | | NM_032118 | 5700403 | 0.000798 |
| | | | XR_000589 | 5810465 | 0.001969 |
| | | | NM_017570 | 5820348 | 0.002957 |
| | | | BU733214 | 5860196 | 0.000367 |
| | | | NM_006082 | 5900156 | 0.000222 |
| | | | NM_005548 | 5900414 | 0.002062 |
| | | | NM_178510 | 5910091 | 0.000822 |
| | | | NM_170699 | 5960035 | 0.000233 |
| | | | NM_139215 | 5960128 | 0.002869 |
| | | | NM_003415 | 6020132 | 0.001268 |
| | | | NM_014230 | 6020402 | 0.002218 |
| | | | NM_004833 | 6040639 | 0.001696 |
| | | | NM_181786 | 6060133 | 0.001626 |
| | | | NM_007255 | 6100220 | 0.00078 |
| | | | NM_007365 | 6110133 | 0.001213 |
| | | | XM_931928 | 6110537 | 0.001296 |
| | | | NM_004044 | 6110768 | 0.000385 |
| | | | NM_006503 | 6180192 | 0.002611 |
| | | | NM_005968 | 6270021 | 0.002343 |
| | | | NM_000074 | 6270128 | 8.15E−05 |
| | | | NM_002964 | 6280576 | 0.001047 |
| | | | AL157484 | 6280682 | 0.000692 |
| | | | NM_001039508 | 6280754 | 0.000859 |
| | | | NM_003755 | 6290431 | 0.001811 |
| | | | XM_936128 | 6290561 | 0.001924 |
| | | | NM_021729 | 6330634 | 0.00132 |
| | | | NM_005176 | 6350360 | 0.000972 |
| | | | XM_001133111 | 6370463 | 0.000949 |
| | | | NM_033416 | 6380598 | 0.000496 |
| | | | NM_006519 | 6380731 | 0.002754 |
| | | | AI184681 | 6400026 | 0.002376 |
| | | | NM_001040107 | 6400563 | 0.000184 |
| | | | NM_001005332 | 6480170 | 0.002105 |
| | | | NM_025150 | 6480328 | 0.001837 |
| | | | NM_033554 | 6480500 | 0.001722 |
| | | | AI732550 | 6480554 | 0.002036 |
| | | | NM_020679 | 6520241 | 0.001034 |
| | | | XR_018793 | 6550142 | 0.001141 |
| | | | NM_006164 | 6580075 | 0.002164 |
| | | | NM_024619 | 6590386 | 0.000143 |
| | | | NM_001007224 | 6590523 | 0.002247 |
| | | | CA436726 | 6620102 | 0.001192 |
| | | | AL577216 | 6650356 | 0.002786 |
| | | | NM_030911 | 6660671 | 0.00082 |
| | | | NM_144779 | 6760487 | 0.002952 |
| | | | NM_006825 | 6770348 | 0.002671 |
| | | | BX110808 | 6770491 | 0.000657 |
| | | | NM_004964 | 6940242 | 0.000592 |
| | | | M97723 | 6940246 | 0.002642 |
| | | | NM_018384 | 6960746 | 0.000337 |
| | | | NM_004776 | 6980070 | 0.000193 |
| | | | NM_178839 | 6980609 | 0.000248 |
| | | | NM_025263 | 7000408 | 0.002112 |
| | | | NM_017773 | 7000768 | 0.002585 |
| | | | NM_182476 | 7050543 | 0.001999 |
| | | | NM_078483 | 7100136 | 0.000162 |
| | | | NM_017481 | 7100392 | 0.002685 |
| | | | NM_006429 | 7150017 | 0.000353 |
| | | | NM_006901 | 7150634 | 0.000569 |
| | | | NM_014976 | 7160296 | 0.00114 |
| | | | AI479236 | 7160470 | 0.002 |
| | | | AW263210 | 7200477 | 0.002998 |
| | | | NM_001008269 | 7320100 | 0.000502 |
| | | | NM_002566 | 7330487 | 0.000769 |
| | | | NM_007167 | 7380274 | 0.001267 |
| | | | NM_016237 | 7380288 | 0.000729 |
| | | | NM_000488 | 7400240 | 0.002702 |
| | | | NM_001037161 | 7510224 | 0.001608 |
| | | | NM_001003722 | 7510369 | 0.001719 |
| | | | NM_001152 | 7550537 | 0.000167 |
| | | | NM_004183 | 7570450 | 0.002439 |
| | | | NM_024422 | 7650025 | 0.001467 |

| | |
|---|---|
| List 46 | List 47 |

| AUC | | 0.83 | | | 0.8 |
|---|---|---|---|---|---|
| Number of | | 203 | | | 357 |
| Transcripts | | | | | |
| Acc.-No. | Probe ID | p-Value | Acc.-No. | Probe ID | p-Value |
| NM_177972 | 10142 | 0.002329 | NM_177972 | 10142 | 0.001456 |
| NM_023003 | 10541 | 0.001154 | NM_001031717 | 10338 | 0.002688 |
| NM_006152 | 20553 | 0.001572 | NM_023003 | 10541 | 0.001509 |
| NM_015062 | 20647 | 0.001034 | NM_006152 | 20553 | 0.002204 |
| XM_001129663 | 130288 | 0.000968 | NM_015062 | 20647 | 0.001282 |
| NM_022136 | 150632 | 0.001841 | NM_004411 | 50168 | 0.003444 |
| AF086457 | 150711 | 0.000995 | NM_006369 | 50240 | 0.002043 |
| XM_932547 | 160121 | 0.000544 | NR_002196 | 50347 | 0.001049 |
| NM_182898 | 160132 | 0.001608 | NM_001005920 | 60328 | 0.001591 |
| XM_933240 | 160202 | 0.002107 | NM_001261 | 60468 | 0.003793 |
| NM_016292 | 160736 | 0.002056 | NM_006567 | 130403 | 0.001951 |
| BM981444 | 240653 | 0.002483 | NM_021078 | 130451 | 0.003205 |
| NM_005103 | 360343 | 0.002618 | NM_022136 | 150632 | 0.002125 |
| NM_015953 | 380685 | 0.001852 | NM_182898 | 160132 | 0.000251 |
| XM_929457 | 380762 | 0.002122 | NM_012426 | 160682 | 0.001499 |
| NM_012212 | 430100 | 0.000976 | NM_016292 | 160736 | 0.001811 |
| NM_002348 | 450037 | 0.000351 | BM981444 | 240653 | 0.002952 |
| NM_018715 | 510450 | 0.000153 | NM_013378 | 360066 | 0.002782 |
| NM_000155 | 520332 | 0.000379 | NM_005103 | 360343 | 0.002696 |
| NM_002129 | 610563 | 0.001672 | NM_022830 | 360402 | 0.003526 |
| AW852357 | 610615 | 0.001548 | NM_015953 | 380685 | 0.003827 |
| NM_001039548 | 620215 | 0.001881 | XM_929457 | 380762 | 0.002276 |
| NM_002896 | 620722 | 0.001524 | NM_002348 | 450037 | 0.000325 |
| CF619198 | 650014 | 0.002171 | NM_194260 | 460273 | 0.0003 |
| NM_000896 | 650164 | 4.19E−05 | NM_021872 | 460754 | 0.001971 |
| CR596519 | 670041 | 0.000321 | NM_018715 | 510450 | 9.61E−05 |
| NM_182830 | 670376 | 0.002133 | NM_000155 | 520332 | 0.000228 |
| NM_025113 | 730632 | 0.002211 | NM_016616 | 580050 | 0.00182 |
| NM_016524 | 730725 | 0.002201 | NM_015074 | 610465 | 0.003167 |
| XR_015582 | 770452 | 0.000289 | NM_002129 | 610563 | 0.000746 |
| XM_374110 | 780437 | 0.00265 | NM_004928 | 610653 | 0.002308 |
| XM_938718 | 870750 | 0.001841 | NM_002896 | 620722 | 0.001368 |
| XM_939144 | 940706 | 0.001055 | NM_000896 | 650164 | 0.000219 |
| AW451403 | 1030270 | 0.001433 | NM_002727 | 650541 | 0.002564 |
| AI311332 | 1030600 | 0.001247 | NM_006243 | 650767 | 0.003306 |
| NM_004927 | 1030692 | 0.002517 | CR596519 | 670041 | 0.000556 |
| AF272739 | 1050128 | 8.83E−05 | NM_001517 | 730543 | 0.00241 |
| NM_015292 | 1110215 | 0.000717 | NM_016524 | 730725 | 0.00196 |
| BC041984 | 1110358 | 0.001264 | XR_015582 | 770452 | 0.001367 |
| NM_003793 | 1110538 | 0.001911 | NM_001398 | 770458 | 0.002653 |
| NM_006720 | 1110575 | 0.002971 | NM_002965 | 830400 | 0.003422 |
| NM_000887 | 1240603 | 0.000605 | CA429313 | 840139 | 0.002331 |
| NM_000578 | 1430292 | 0.00066 | NM_199337 | 840730 | 0.001996 |
| NM_007199 | 1430762 | 0.002269 | NM_014873 | 870403 | 0.003279 |
| NM_001716 | 1440291 | 0.002699 | NM_014358 | 940754 | 0.003102 |
| NM_003343 | 1440382 | 0.0011 | NM_015380 | 990273 | 0.002688 |
| XM_938227 | 1450482 | 0.002966 | NM_012252 | 990377 | 0.001966 |
| NM_001037325 | 1470332 | 0.000893 | NM_173608 | 1010220 | 0.003747 |
| CB240909 | 1470372 | 0.00138 | AA335815 | 1010671 | 0.002966 |
| NM_006306 | 1500040 | 0.002117 | AF272739 | 1050128 | 0.000586 |
| NM_015039 | 1580348 | 0.000316 | NM_198157 | 1050360 | 0.003341 |
| AA972207 | 1580445 | 0.002786 | AW236020 | 1070131 | 0.003413 |
| BX101820 | 1690504 | 0.00269 | NM_006608 | 1070189 | 0.00296 |
| NM_018285 | 1780348 | 0.001088 | NM_024949 | 1070348 | 0.001835 |
| NM_001099786 | 1820598 | 0.000518 | NM_207107 | 1070377 | 0.001853 |
| NM_024108 | 1980424 | 0.002434 | NM_153611 | 1090048 | 0.002929 |
| NM_012395 | 2000390 | 0.001032 | NM_016464 | 1090139 | 0.002779 |
| BM272556 | 2000474 | 0.001239 | NM_015292 | 1110215 | 0.000501 |
| XM_936353 | 2030544 | 0.000513 | BC041984 | 1110358 | 0.002383 |
| NM_001013651 | 2060338 | 0.001442 | BM679696 | 1110537 | 0.00371 |
| AA910733 | 2070452 | 0.000848 | NM_003793 | 1110538 | 0.002744 |
| NM_004226 | 2100035 | 0.001599 | NM_006720 | 1110575 | 0.001923 |
| CK299581 | 2120356 | 0.000628 | NM_000878 | 1170307 | 0.003781 |
| NM_001005389 | 2140242 | 0.002727 | NM_006576 | 1240070 | 0.002371 |
| NM_014738 | 2190673 | 0.002535 | NM_000887 | 1240603 | 0.000255 |
| XM_935843 | 2260446 | 0.000632 | NM_021105 | 1260228 | 0.000814 |
| XM_932015 | 2370341 | 0.001837 | XM_377476 | 1340338 | 0.001954 |
| NM_007115 | 2370524 | 2.66E−05 | NM_004716 | 1400270 | 0.003217 |
| BX096685 | 2450343 | 0.001304 | NM_016286 | 1410369 | 0.00052 |
| T03068 | 2450497 | 9.16E−05 | NM_014853 | 1410400 | 0.003891 |
| NM_181803 | 2450603 | 0.002804 | NM_000578 | 1430292 | 0.000584 |
| AW578902 | 2510324 | 0.002784 | NM_007199 | 1430762 | 0.001161 |
| NM_031412 | 2630154 | 0.000461 | NM_003343 | 1440382 | 0.001825 |
| NM_003528 | 2630451 | 0.000164 | NM_002080 | 1440546 | 0.002679 |
| NM_025153 | 2630484 | 5.73E−06 | NM_016408 | 1440601 | 0.0009 |
| NM_005980 | 2640609 | 0.001492 | NM_021117 | 1450082 | 0.003077 |
| NM_020698 | 2650152 | 0.002638 | NM_001686 | 1450706 | 0.002817 |
| NM_019111 | 2680370 | 0.001629 | CR593212 | 1470040 | 0.003014 |
| NM_001014838 | 2690609 | 0.001107 | NM_001037325 | 1470332 | 0.000876 |
| NM_001414 | 2760563 | 0.001875 | CB240909 | 1470372 | 0.002717 |
| BG188859 | 2810630 | 0.001682 | NM_006306 | 1500040 | 0.003999 |
| XM_001126803 | 2850274 | 0.001641 | NM_003855 | 1500328 | 0.002353 |
| NM_031488 | 3120301 | 0.000356 | NM_000314 | 1500717 | 0.003704 |
| NM_017905 | 3130091 | 0.002024 | NM_015039 | 1580348 | 0.000158 |
| NM_020925 | 3140142 | 0.0013813 | BX114980 | 1660204 | 0.003081 |
| NM_033111 | 3140246 | 0.002118 | BX101820 | 1690504 | 0.000107 |
| BX111143 | 3180440 | 0.001248 | NM_002405 | 1710286 | 0.000137 |
| CB046255 | 3310075 | 0.002408 | NM_003375 | 1770379 | 0.002947 |
| BI260057 | 3310341 | 0.002771 | NM_018285 | 1780348 | 0.000257 |
| NM_014941 | 3360364 | 0.000257 | NM_001099786 | 1820598 | 0.000418 |
| NM_020808 | 3370605 | 0.002304 | NM_019053 | 1940543 | 0.001551 |
| NM_000884 | 3400504 | 0.002402 | NM_016839 | 1980092 | 0.002857 |
| NM_015288 | 3420735 | 0.002842 | NM_024108 | 1980424 | 0.001579 |
| XM_001126287 | 3440040 | 0.001018 | NM_173659 | 1990673 | 0.003102 |
| NM_012110 | 3440431 | 0.002375 | NM_002365 | 1990703 | 0.003535 |
| NM_139244 | 3460189 | 0.000544 | NM_005184 | 1990762 | 0.001397 |
| NM_003137 | 3460674 | 0.000329 | NM_012395 | 2000390 | 0.000425 |
| NM_003707 | 3520082 | 0.000548 | BM272556 | 2000474 | 0.003138 |
| NM_213566 | 3520192 | 0.000494 | NM_001040138 | 2000551 | 0.001316 |
| NM_005476 | 3610504 | 0.00042 | NM_012155 | 2030450 | 0.002936 |
| NM_000648 | 3800270 | 0.000658 | AA628808 | 2030543 | 0.00328 |
| XM_930898 | 3830390 | 9.69E−05 | XM_936353 | 2030544 | 0.002128 |
| AK025332 | 3850020 | 0.002021 | NM_032138 | 2030747 | 0.003784 |
| BU729036 | 3850367 | 0.000728 | NM_017801 | 2070152 | 0.003627 |
| NM_005225 | 3940338 | 0.002976 | NM_175887 | 2070201 | 0.002794 |
| XM_940524 | 3940368 | 0.000574 | NM_004226 | 2100035 | 0.000859 |
| XM_496059 | 3990465 | 0.001402 | NM_017758 | 2100221 | 0.000121 |
| X00437 | 3990639 | 0.000503 | NM_198196 | 2100333 | 0.00369 |
| NM_022827 | 4120133 | 0.001575 | NM_006469 | 2100519 | 0.002129 |
| AA868051 | 4150402 | 0.001528 | CK299581 | 2120356 | 0.000303 |
| NM_024600 | 4210647 | 0.001538 | NM_001077692 | 2120681 | 0.003489 |
| NM_001042631 | 4220138 | 0.000983 | NM_207111 | 2190524 | 0.002054 |
| NM_139247 | 4230653 | 0.000805 | NM_014738 | 2190673 | 0.000185 |
| NM_012455 | 4250280 | 0.002278 | AI537683 | 2230594 | 0.002292 |
| NM_020414 | 4280332 | 0.000499 | NM_005356 | 2230661 | 0.003648 |
| NM_015651 | 4540082 | 0.001064 | XM_935843 | 2260446 | 0.000153 |
| AI433683 | 4560463 | 0.000717 | XM_932015 | 2370341 | 0.002144 |
| XM_942378 | 4590400 | 0.001671 | NM_007115 | 2370524 | 3.72E−06 |
| NM_003543 | 4730195 | 7.59E−05 | BQ372445 | 2370681 | 0.000584 |
| CK300859 | 4730577 | 0.000937 | AI217168 | 2450039 | 0.001595 |
| NM_016553 | 4760543 | 0.000244 | BX096685 | 2450343 | 0.001624 |
| NM_012321 | 4830563 | 0.001969 | T03068 | 2450497 | 0.000721 |
| NM_006725 | 4850192 | 0.001494 | NM_181803 | 2450603 | 0.000989 |
| XM_936107 | 4850241 | 0.001146 | NM_001605 | 2490747 | 0.003443 |
| NM_016552 | 4850541 | 0.00067 | NM_031412 | 2630154 | 0.001573 |
| NM_032320 | 4860296 | 0.002987 | NM_020408 | 2630181 | 0.001285 |
| BX096603 | 4880373 | 0.00289 | NM_003528 | 2630451 | 0.000937 |
| NM_014281 | 4900053 | 0.000355 | NM_025153 | 2630484 | 0.000145 |
| BM669760 | 4900497 | 0.002826 | NM_002012 | 2630500 | 0.00324 |
| NM_003559 | 5090477 | 0.00048 | NM_005937 | 2630719 | 0.002777 |
| NM_002150 | 5090554 | 0.000387 | NM_005980 | 2640609 | 0.000931 |
| AA765688 | 5090647 | 0.00087 | NM_019111 | 2680370 | 0.003073 |
| NM_003853 | 5130475 | 0.002923 | NM_015705 | 2690576 | 0.003107 |
| NM_003221 | 5130553 | 0.002112 | NM_001014838 | 2690609 | 0.000645 |
| NM_005902 | 5130767 | 0.002581 | XM_001129302 | 2710168 | 0.003266 |
| CD243631 | 5270450 | 0.000608 | NM_005412 | 2710278 | 0.003406 |
| NM_000075 | 5270500 | 0.001944 | NM_003059 | 2710397 | 0.002168 |
| NM_032312 | 5290289 | 0.001788 | NM_000477 | 2710427 | 0.002062 |
| NM_012387 | 5310653 | 0.001357 | NM_001018062 | 2750035 | 0.002623 |
| NM_003906 | 5390131 | 0.001975 | NM_001854 | 2750070 | 0.000658 |
| NM_006321 | 5390669 | 0.000818 | NM_003707 | 2750408 | 0.00087 |
| BX113537 | 5550270 | 0.001739 | NM_001961 | 2750626 | 0.003016 |
| NM_152272 | 5550746 | 0.001593 | NM_005449 | 2760092 | 0.003797 |
| NM_013270 | 5690037 | 0.000449 | NM_001414 | 2760563 | 0.003576 |
| NM_032118 | 5700403 | 0.001594 | NM_016546 | 2760593 | 0.003162 |
| NM_173791 | 5720398 | 0.00254 | NM_005082 | 2850576 | 0.002305 |
| NM_002808 | 5720497 | 0.000366 | NM_001384 | 2900524 | 0.001359 |
| NM_017570 | 5820348 | 0.001129 | NM_003553 | 2940053 | 0.002948 |
| BU733214 | 5860196 | 0.000376 | NM_032491 | 3120181 | 0.00276 |
| NM_021052 | 5860400 | 0.000553 | NM_031488 | 3120301 | 0.000158 |
| BM974838 | 5870300 | 0.000467 | NM_017905 | 3130091 | 0.001142 |
| NM_006082 | 5900156 | 0.000428 | NM_004555 | 3130291 | 0.001592 |
| NM_005548 | 5900414 | 0.001635 | NM_016230 | 3140039 | 0.001651 |
| NM_178510 | 5910091 | 0.001985 | NM_205548 | 3140088 | 0.000507 |
| XM_001131964 | 5910343 | 0.001426 | NM_006767 | 3140093 | 0.001209 |
| NM_170699 | 5960035 | 0.001112 | NM_020925 | 3140142 | 0.002377 |
| NM_003415 | 6020132 | 0.002974 | NM_033111 | 3140246 | 0.000989 |
| NM_014230 | 6020402 | 0.002686 | NM_015710 | 3170092 | 0.001023 |
| NM_032839 | 6020575 | 0.002106 | XM_936295 | 3180523 | 0.002392 |
| NM_007365 | 6110133 | 0.002133 | CB046255 | 3310075 | 0.000367 |
| XM_931928 | 6110537 | 0.000484 | BI260057 | 3310341 | 0.000518 |
| NM_004044 | 6110768 | 0.000594 | NM_014941 | 3360364 | 4.61E−05 |
| NM_000074 | 6270128 | 0.000132 | NM_020808 | 3370605 | 0.002185 |
| NM_001039508 | 6280754 | 0.001096 | NM_005698 | 3370687 | 0.000458 |
| XM_936128 | 6290561 | 0.001469 | NM_003475 | 3390008 | 0.002397 |
| NM_001032999 | 6380050 | 0.002837 | NM_170736 | 3390458 | 0.002464 |
| NM_001032363 | 6380358 | 0.002699 | NM_207311 | 3420343 | 0.00322 |
| NM_033416 | 6380598 | 0.000237 | NM_015288 | 3420735 | 0.001555 |
| AW195556 | 6400187 | 0.002242 | XM_001126287 | 3440040 | 0.002183 |
| NM_025150 | 6480328 | 0.002394 | NM_012110 | 3440431 | 0.001984 |
| NM_033554 | 6480500 | 0.000848 | NM_139244 | 3460189 | 0.001215 |
| AW779539 | 6510452 | 0.001498 | NM_024430 | 3460523 | 0.002452 |
| NM_024619 | 6590386 | 0.000849 | NM_003137 | 3460674 | 0.00014 |
| NM_001007224 | 6590523 | 0.001316 | NM_003707 | 3520082 | 0.00205 |
| CB066794 | 6650482 | 0.00196 | NM_213566 | 3520192 | 0.000899 |
| CA424950 | 6650576 | 0.00117 | NM_005476 | 3610504 | 0.000258 |
| BG1217842 | 6660056 | 0.002945 | NM_020531 | 3610634 | 0.003802 |
| NM_006825 | 6770348 | 0.002251 | NM_002883 | 3710189 | 0.001488 |
| AA576740 | 6840408 | 0.002089 | NM_018129 | 3780220 | 0.001767 |
| NM_004964 | 6940242 | 0.002499 | NM_001002010 | 3780689 | 0.002077 |
| M97723 | 6940246 | 0.001888 | NM_052889 | 3780747 | 0.003272 |
| NM_001033515 | 6960328 | 0.002757 | NM_000648 | 3800270 | 0.00343 |
| NM_018384 | 6960746 | 0.000361 | XM_943902 | 3800382 | 0.001606 |
| NM_004776 | 6980070 | 0.000499 | XM_930898 | 3830390 | 0.002862 |
| BI915661 | 6980274 | 0.000463 | NM_004092 | 3840022 | 0.000495 |
| NM_138576 | 7000133 | 0.00234 | NM_024326 | 3930687 | 0.001645 |
| NM_025263 | 7000408 | 0.002421 | NM_000849 | 3940386 | 0.002075 |
| XM_943393 | 7050196 | 0.000729 | NM_012111 | 3990192 | 0.003566 |
| NM_182476 | 7050543 | 0.002821 | XM_496059 | 3990465 | 0.002277 |
| NM_078483 | 7100136 | 0.000439 | X00437 | 3990639 | 0.000336 |
| NM_017481 | 7100392 | 0.001519 | BM668555 | 4050270 | 0.001619 |
| NM_006429 | 7150017 | 0.00141 | NM_002635 | 4050398 | 0.002878 |
| NM_006901 | 7150634 | 0.000284 | NM_153329 | 4050411 | 0.001925 |
| NM_014976 | 7160296 | 0.001192 | NM_015054 | 4060056 | 0.002765 |
| AI479236 | 7160470 | 0.002735 | NM_004811 | 4060131 | 0.001071 |
| NM_003757 | 7320576 | 0.00123 | NM_030915 | 4120086 | 0.002988 |
| NM_007167 | 7380274 | 0.00159 | NM_001779 | 4150161 | 0.001027 |
| NM_016237 | 7380288 | 0.001302 | AA868051 | 4150402 | 0.000262 |
| NM_001923 | 7400121 | 0.001106 | NM_002756 | 4150632 | 0.001356 |
| NM_001037161 | 7510224 | 0.002262 | NM_016091 | 4180142 | 0.00252 |
| NM_001152 | 7550537 | 0.000158 | XM_378421 | 4200148 | 0.001375 |
| NM_032717 | 7610546 | 0.001923 | NM_015721 | 4200538 | 0.001048 |
| NM_001313 | 7650458 | 0.001914 | NM_024600 | 4210647 | 0.001184 |
| | | | NM_001042631 | 4220138 | 0.000866 |
| | | | NM_002496 | 4220181 | 0.002053 |
| | | | AI863525 | 4230520 | 0.000274 |
| | | | NM_139247 | 4230653 | 0.000973 |
| | | | BQ894602 | 4230706 | 0.003125 |
| | | | NM_183384 | 4280047 | 0.000834 |
| | | | NM_020414 | 4280332 | 0.000423 |
| | | | NM_138554 | 4390615 | 0.002746 |
| | | | NM_015651 | 4540082 | 0.000308 |
| | | | BC016972 | 4540088 | 0.002144 |
| | | | BX102269 | 4540114 | 0.003399 |
| | | | NM_015433 | 4540301 | 0.000651 |
| | | | AI433683 | 4560463 | 0.000984 |
| | | | NM_015654 | 4560601 | 0.002683 |
| | | | BU752667 | 4560703 | 0.002272 |
| | | | BX096530 | 4610670 | 0.002723 |
| | | | NM_138931 | 4640044 | 0.001309 |
| | | | NM_025228 | 4640528 | 0.003713 |
| | | | DA122577 | 4670259 | 0.001993 |
| | | | NM_003543 | 4730195 | 0.000341 |
| | | | CK300859 | 4730577 | 0.000106 |
| | | | NM_016553 | 4760543 | 2.55E−05 |
| | | | NM_005243 | 4780743 | 0.002978 |
| | | | NM_030811 | 4830435 | 0.001748 |
| | | | NM_006725 | 4850192 | 0.000947 |
| | | | NM_016552 | 4850541 | 0.000257 |
| | | | NM_032320 | 4860296 | 0.001214 |
| | | | NM_024092 | 4880364 | 0.00344 |
| | | | BX096603 | 4880373 | 0.000369 |
| | | | NM_007171 | 4880681 | 0.003294 |
| | | | NM_014281 | 4900053 | 1.89E−05 |
| | | | BM669760 | 4900497 | 0.001931 |
| | | | NM_018079 | 5080056 | 0.00105 |
| | | | NM_015702 | 5090204 | 0.000414 |
| | | | NM_003559 | 5090477 | 0.00074 |
| | | | NM_002150 | 5090554 | 0.003485 |
| | | | NM_007355 | 5130082 | 0.002507 |
| | | | AA431917 | 5130154 | 0.001307 |
| | | | NM_016423 | 5130341 | 0.003578 |
| | | | NM_003853 | 5130475 | 0.001765 |
| | | | BU587445 | 5130747 | 0.00211 |
| | | | CD693563 | 5260184 | 0.00302 |
| | | | NM_000075 | 5270500 | 0.002368 |
| | | | NM_032312 | 5290289 | 0.000641 |
| | | | NM_022730 | 5310050 | 0.001909 |
| | | | NM_001033667 | 5310136 | 0.002721 |
| | | | NM_012387 | 5310653 | 0.002029 |
| | | | NM_001007239 | 5310754 | 0.000923 |
| | | | AA668491 | 5360400 | 0.00277 |
| | | | NM_015713 | 5390100 | 0.00371 |
| | | | NM_003906 | 5390131 | 0.000496 |
| | | | NM_006321 | 5390669 | 0.002487 |
| | | | NM_000852 | 5420538 | 0.003886 |
| | | | NM_001001998 | 5490142 | 0.003903 |
| | | | NM_152272 | 5550746 | 0.0025 |
| | | | AK125708 | 5560093 | 0.003459 |
| | | | NM_004665 | 5570673 | 0.003902 |
| | | | NM_013270 | 5690037 | 0.000251 |
| | | | NM_032118 | 5700403 | 0.000798 |
| | | | NM_173791 | 5720398 | 0.003847 |
| | | | NM_002808 | 5720497 | 0.003313 |
| | | | XR_000589 | 5810465 | 0.001969 |
| | | | NM_017570 | 5820348 | 0.002957 |
| | | | BU733214 | 5860196 | 0.000367 |
| | | | NM_014141 | 5890273 | 0.003312 |
| | | | NM_001628 | 5890327 | 0.003688 |
| | | | NM_006082 | 5900156 | 0.000222 |
| | | | NM_005548 | 5900414 | 0.002062 |
| | | | NM_178510 | 5910091 | 0.000822 |
| | | | NM_170699 | 5960035 | 0.000233 |
| | | | NM_139215 | 5960128 | 0.002869 |
| | | | NM_003415 | 6020132 | 0.001268 |
| | | | NM_014230 | 6020402 | 0.002218 |
| | | | NM_004833 | 6040639 | 0.001696 |
| | | | NM_181786 | 6060133 | 0.001626 |
| | | | NM_007255 | 6100220 | 0.00078 |
| | | | NM_024839 | 6110132 | 0.003698 |
| | | | NM_007365 | 6110133 | 0.001213 |
| | | | XM_931928 | 6110537 | 0.001296 |
| | | | NM_004044 | 6110768 | 0.000385 |
| | | | NM_006503 | 6180192 | 0.002611 |
| | | | NM_005968 | 6270021 | 0.002343 |
| | | | NM_000074 | 6270128 | 8.15E−05 |
| | | | NM_002964 | 6280576 | 0.001047 |
| | | | AL157484 | 6280682 | 0.000692 |
| | | | NM_001039508 | 6280754 | 0.000859 |
| | | | NM_003755 | 6290431 | 0.001811 |
| | | | XM_936128 | 6290561 | 0.001924 |
| | | | NM_021729 | 6330634 | 0.00132 |
| | | | NM_005176 | 6350360 | 0.000972 |
| | | | XM_001133111 | 6370463 | 0.000949 |
| | | | NM_033416 | 6380598 | 0.000496 |
| | | | NM_006519 | 6380731 | 0.002754 |
| | | | AI184681 | 6400026 | 0.002376 |
| | | | NM_006242 | 6400064 | 0.003176 |
| | | | NM_005360 | 6400369 | 0.003275 |
| | | | NM_001040107 | 6400563 | 0.000184 |
| | | | XM_937796 | 6420079 | 0.003331 |
| | | | AK128384 | 6420541 | 0.003933 |
| | | | NM_001005332 | 6480170 | 0.002105 |
| | | | NM_025150 | 6480328 | 0.001837 |
| | | | NM_033554 | 6480500 | 0.001722 |
| | | | AI732550 | 6480554 | 0.002036 |
| | | | NM_020679 | 6520241 | 0.001034 |
| | | | XR_018793 | 6550142 | 0.001141 |
| | | | NM_001040273 | 6550762 | 0.003428 |
| | | | NM_006164 | 6580075 | 0.002164 |
| | | | NM_024619 | 6590386 | 0.000143 |
| | | | NM_001007224 | 6590523 | 0.002247 |
| | | | CA436726 | 6620102 | 0.001192 |
| | | | AL577216 | 6650356 | 0.002786 |
| | | | NM_015214 | 6660020 | 0.00362 |
| | | | NM_030911 | 6660671 | 0.00082 |
| | | | NM_000632 | 6660709 | 0.003279 |
| | | | NM_144779 | 6760487 | 0.002952 |
| | | | NM_006825 | 6770348 | 0.002671 |
| | | | BX110808 | 6770491 | 0.000657 |
| | | | NR_003141 | 6840162 | 0.003603 |
| | | | AA576740 | 6840408 | 0.003069 |
| | | | H89368 | 6900689 | 0.003575 |
| | | | NM_004964 | 6940242 | 0.000592 |
| | | | M97723 | 6940246 | 0.002642 |
| | | | NM_001033515 | 6960328 | 0.003545 |
| | | | NM_018384 | 6960746 | 0.000337 |
| | | | NM_004776 | 6980070 | 0.000193 |
| | | | BI915661 | 6980274 | 0.003684 |
| | | | NM_178839 | 6980609 | 0.000248 |
| | | | NM_025263 | 7000408 | 0.002112 |
| | | | NM_017773 | 7000768 | 0.002585 |
| | | | NM_182476 | 7050543 | 0.001999 |
| | | | NM_078483 | 7100136 | 0.000162 |
| | | | NM_017481 | 7100392 | 0.002685 |
| | | | NM_006429 | 7150017 | 0.000353 |
| | | | NM_006901 | 7150634 | 0.000569 |
| | | | NM_014976 | 7160296 | 0.00114 |
| | | | AI479236 | 7160470 | 0.002 |
| | | | AW263210 | 7200477 | 0.002998 |
| | | | NM_145806 | 7210369 | 0.003405 |
| | | | NM_015474 | 7320047 | 0.003831 |
| | | | NM_001008269 | 7320100 | 0.000502 |
| | | | NM_004813 | 7320551 | 0.003202 |
| | | | NM_003757 | 7320576 | 0.003074 |
| | | | NM_002566 | 7330487 | 0.000769 |
| | | | NM_007167 | 7380274 | 0.001267 |
| | | | NM_016237 | 7380288 | 0.000729 |
| | | | NM_001923 | 7400121 | 0.003534 |
| | | | NM_000488 | 7400240 | 0.002702 |
| | | | NM_001037161 | 7510224 | 0.001608 |
| | | | NM_001003722 | 7510369 | 0.001719 |
| | | | NM_001152 | 7550537 | 0.000167 |
| | | | NM_004183 | 7570450 | 0.002439 |
| | | | BX108926 | 7610148 | 0.003989 |
| | | | NM_032717 | 7610546 | 0.003466 |
| | | | NM_024422 | 7650025 | 0.001467 |
| | | | | | 9.00E−05 |

| | |
|---|---|
| List 48 | List 49 |

| AUC | | 0.8125 | | | 0.83 |
|---|---|---|---|---|---|
| Number of | | 501 | | | 203 |
| Transcripts | | | | | |
| Acc.-No. | Probe ID | p-Value | Acc.-No. | Probe ID | p-Value |
| NM_000574 | 10025 | 0.001655446 | NM_177972 | 10142 | 0.002329 |
| NM_022736 | 10086 | 0.002911619 | NM_023003 | 10541 | 0.001154 |
| XM_931749 | 10110 | 0.00222351 | NM_006152 | 20553 | 0.001572 |
| NM_177972 | 10142 | 0.001018248 | NM_015062 | 20647 | 0.001034 |
| NM_005621 | 10279 | 0.000319168 | NM_052901 | 130113 | 0.003255 |
| NM_001031717 | 10338 | 0.001963946 | NM_006567 | 130403 | 0.003842 |
| NM_023003 | 10541 | 0.000152211 | NM_022136 | 150632 | 0.001841 |
| NM_145799 | 20154 | 0.001891036 | XM_932547 | 160121 | 0.000544 |
| NM_206967 | 20224 | 0.000148094 | NM_182898 | 160132 | 0.001608 |
| NM_006152 | 20553 | 0.001468078 | NM_016292 | 160736 | 0.002056 |
| NM_015062 | 20647 | 0.000190585 | NM_005103 | 360343 | 0.002618 |
| NM_014669 | 50164 | 0.001351738 | NM_015959 | 380315 | 0.00329 |
| NM_006369 | 50240 | 0.003857416 | NM_015953 | 380685 | 0.001852 |
| NM_001261 | 60468 | 0.003923877 | NM_012212 | 430100 | 0.000976 |
| NM_003626 | 110576 | 0.003117196 | NM_002348 | 450037 | 0.000351 |
| NM_052901 | 130113 | 0.002066823 | NM_021872 | 460754 | 0.003626 |
| NM_006567 | 130403 | 0.001646811 | NM_018715 | 510450 | 0.000153 |
| NM_021078 | 130451 | 0.000793685 | NM_000155 | 520332 | 0.000379 |
| NM_139250 | 130605 | 0.001562215 | NM_002129 | 610563 | 0.001672 |
| NM_022136 | 150632 | 0.001427127 | NM_002896 | 620722 | 0.001524 |
| XM_932547 | 160121 | 0.003230739 | CF619198 | 650014 | 0.002171 |
| NM_182898 | 160132 | 0.000212857 | NM_000896 | 650164 | 4.19E−05 |
| NM_005804 | 160240 | 0.001722955 | CR596519 | 670041 | 0.000321 |
| NM_012426 | 160682 | 0.000377309 | NM_182830 | 670376 | 0.002133 |
| NM_016292 | 160736 | 9.71E−05 | NM_025113 | 730632 | 0.002211 |
| NM_000902 | 240608 | 0.002095034 | NM_016524 | 730725 | 0.002201 |
| XM_933693 | 270768 | 0.002664127 | XR_015582 | 770452 | 0.000289 |
| NM_213674 | 290452 | 0.00284241 | XM_374110 | 780437 | 0.00265 |
| NM_206831 | 360187 | 0.003980793 | NM_006427 | 830754 | 0.00347 |
| NM_005103 | 360343 | 0.002573069 | NM_199337 | 840730 | 0.003185 |
| NM_022830 | 360402 | 0.00285291 | XM_939144 | 940706 | 0.001055 |
| NM_015959 | 380315 | 0.002217679 | NM_014358 | 940754 | 0.003562 |
| NM_003971 | 380541 | 0.002112128 | NM_021209 | 1030041 | 0.003968 |
| NM_015953 | 380685 | 0.000244442 | NM_004927 | 1030692 | 0.002517 |
| NM_012212 | 430100 | 0.001930872 | AF272739 | 1050128 | 8.83E−05 |
| NM_002348 | 450037 | 0.000158029 | NM_015292 | 1110215 | 0.000717 |
| NM_016025 | 460142 | 0.000869014 | BC041984 | 1110358 | 0.001264 |
| NM_021872 | 460754 | 0.000351103 | NM_003793 | 1110538 | 0.001911 |
| NM_018715 | 510450 | 5.75E−05 | NM_006720 | 1110575 | 0.002971 |
| AK130294 | 520154 | 0.001648963 | NM_000878 | 1170307 | 0.003196 |
| NM_000155 | 520332 | 2.00E−05 | NM_000887 | 1240603 | 0.000605 |
| NM_020448 | 520360 | 0.002502797 | NM_006066 | 1300768 | 0.003304 |
| NM_003960 | 520564 | 0.003828033 | NM_000578 | 1430292 | 0.00066 |
| NM_005134 | 610408 | 0.001924456 | NM_007199 | 1430762 | 0.002269 |
| NM_015074 | 610465 | 0.003320585 | NM_001716 | 1440291 | 0.002699 |
| NM_002129 | 610563 | 0.000424355 | NM_003343 | 1440382 | 0.0011 |
| NM_004928 | 610653 | 0.001533302 | NM_002080 | 1440546 | 0.003555 |
| NM_002896 | 620722 | 0.000360725 | NM_016408 | 1440601 | 0.003167 |
| CF619198 | 650014 | 0.002371917 | NM_006306 | 1500040 | 0.002117 |
| NM_000896 | 650164 | 2.29E−05 | NM_015039 | 1580348 | 0.000316 |
| BQ185068 | 650343 | 0.001601603 | BX101820 | 1690504 | 0.00269 |
| NM_000485 | 650358 | 0.002431797 | NM_002405 | 1710286 | 0.003796 |
| NM_002727 | 650541 | 0.00256916 | NM_018285 | 1780348 | 0.001088 |
| NM_006243 | 650767 | 0.003445231 | NM_001099786 | 1820598 | 0.000518 |
| CR596519 | 670041 | 5.24E−05 | NM_024108 | 1980424 | 0.002434 |
| XM_929135 | 670358 | 0.002159668 | NM_012395 | 2000390 | 0.001032 |
| NM_182830 | 670376 | 0.000701309 | XM_936353 | 2030544 | 0.000513 |
| NM_001517 | 730543 | 0.001256629 | NM_032138 | 2030747 | 0.003673 |
| NM_025113 | 730632 | 0.001199479 | NM_004226 | 2100035 | 0.001599 |
| NM_016524 | 730725 | 0.001021834 | NM_198196 | 2100333 | 0.003285 |
| XR_015582 | 770452 | 0.002133647 | NM_014738 | 2190673 | 0.002535 |
| NM_001398 | 770458 | 0.00329774 | NM_005356 | 2230661 | 0.003517 |
| NM_017726 | 780332 | 0.001404204 | XM_935843 | 2260446 | 0.000632 |
| XM_374110 | 780437 | 0.001676896 | NM_007115 | 2370524 | 2.66E−05 |
| NM_002965 | 830400 | 0.002022781 | AI217168 | 2450039 | 0.003395 |
| NM_006427 | 830754 | 0.000392179 | BX096685 | 2450343 | 0.001304 |
| NM_003329 | 830762 | 0.001848461 | T03068 | 2450497 | 9.16E−05 |
| CA429313 | 840139 | 0.003553969 | NM_181803 | 2450603 | 0.002804 |
| NM_199337 | 840730 | 0.000683848 | NM_006031 | 2480082 | 0.003595 |
| NM_012198 | 940348 | 0.002519579 | AW578902 | 2510324 | 0.002784 |
| NM_001013706 | 940450 | 0.002877982 | NM_031412 | 2630154 | 0.000461 |
| XM_939144 | 940706 | 0.001223214 | NM_003528 | 2630451 | 0.000164 |
| NM_014358 | 940754 | 0.002819739 | NM_025153 | 2630484 | 5.73E−06 |
| NM_020131 | 990224 | 0.002018907 | NM_005980 | 2640609 | 0.001492 |
| NM_015380 | 990273 | 0.00089638 | NM_020698 | 2650152 | 0.002638 |
| NM_173608 | 1010220 | 0.002887273 | NM_019111 | 2680370 | 0.001629 |
| NM_004104 | 1010398 | 0.002174163 | NM_001014838 | 2690609 | 0.001107 |
| NM_021209 | 1030041 | 0.003497215 | NM_003707 | 2750408 | 0.003834 |
| NM_004927 | 1030692 | 0.001364208 | NM_001414 | 2760563 | 0.001875 |
| AF272739 | 1050128 | 0.000316207 | XM_942926 | 2810674 | 0.003207 |
| NM_006608 | 1070189 | 0.002798716 | NM_001384 | 2900524 | 0.003026 |
| NM_153611 | 1090048 | 0.001324233 | NM_031488 | 3120301 | 0.000356 |
| NM_015292 | 1110215 | 5.97E−05 | NM_017905 | 3130091 | 0.002024 |
| BC041984 | 1110358 | 0.00154051 | NM_016230 | 3140039 | 0.00388 |
| NM_003793 | 1110538 | 0.002859599 | NM_006767 | 3140093 | 0.00326 |
| NM_006720 | 1110575 | 0.000394092 | NM_020925 | 3140142 | 0.00138 |
| NM_000878 | 1170307 | 0.002665715 | NM_033111 | 3140246 | 0.002118 |
| NM_006576 | 1240070 | 0.003339107 | NM_015710 | 3170092 | 0.003409 |
| NM_000887 | 1240603 | 0.000240702 | NM_014941 | 3360364 | 0.000257 |
| NM_021105 | 1260228 | 0.000288576 | NM_020808 | 3370605 | 0.002304 |
| NM_006066 | 1300768 | 0.001774136 | NM_000884 | 3400504 | 0.002402 |
| XM_377476 | 1340338 | 0.001861988 | NM_015288 | 3420735 | 0.002842 |
| NM_001039708 | 1340731 | 0.001308961 | XM_001126287 | 3440040 | 0.001018 |
| NM_004716 | 1400270 | 0.001345235 | NM_012110 | 3440431 | 0.002375 |
| NM_016286 | 1410369 | 0.000395447 | NM_139244 | 3460189 | 0.000544 |
| NM_001040034 | 1430133 | 0.002779732 | NM_003137 | 3460674 | 0.000329 |
| NM_000578 | 1430292 | 0.000337807 | NM_003707 | 3520082 | 0.000548 |
| NM_004629 | 1430451 | 0.001401848 | NM_213566 | 3520192 | 0.000494 |
| NM_007199 | 1430762 | 0.00110173 | NM_005476 | 3610504 | 0.00042 |
| NM_001716 | 1440291 | 0.000503419 | NM_020531 | 3610634 | 0.00369 |
| NM_003343 | 1440382 | 0.00157486 | XM_932678 | 3800253 | 0.003845 |
| NM_020230 | 1440487 | 0.003475252 | NM_000648 | 3800270 | 0.000658 |
| NM_002080 | 1440546 | 0.000463339 | XM_930898 | 3830390 | 9.69E−05 |
| NM_016408 | 1440601 | 0.001613449 | NM_004092 | 3840022 | 0.003104 |
| AW519230 | 1440717 | 0.002048199 | CF887308 | 3940020 | 0.003859 |
| NM_198578 | 1450523 | 0.002261241 | NM_005225 | 3940338 | 0.002976 |
| CA314866 | 1470541 | 0.003163582 | XM_940524 | 3940368 | 0.000574 |
| NM_006306 | 1500040 | 0.001726778 | XM_496059 | 3990465 | 0.001402 |
| NM_003855 | 1500328 | 0.003175803 | X00437 | 3990639 | 0.000503 |
| NM_000314 | 1500717 | 0.000587475 | NM_015054 | 4060056 | 0.003913 |
| NM_015039 | 1580348 | 0.000204546 | NM_022827 | 4120133 | 0.001575 |
| NM_003914 | 1660309 | 0.003883164 | NM_001779 | 4150161 | 0.003761 |
| NM_153201 | 1690189 | 0.002221835 | AA868051 | 4150402 | 0.001528 |
| BX101820 | 1690504 | 0.001519656 | NM_015721 | 4200538 | 0.003581 |
| CA429381 | 1690767 | 0.003696335 | NM_024600 | 4210647 | 0.001538 |
| NM_018054 | 1710100 | 0.001265986 | NM_001042631 | 4220138 | 0.000983 |
| NM_006424 | 1710189 | 0.002325573 | NM_139247 | 4230653 | 0.000805 |
| NM_002405 | 1710286 | 0.00051632 | NM_020414 | 4280332 | 0.000499 |
| NM_014871 | 1740576 | 0.002417046 | NM_015651 | 4540082 | 0.001064 |
| NM_018285 | 1780348 | 0.000157742 | NM_015433 | 4540301 | 0.003546 |
| XM_940071 | 1780368 | 0.003104333 | XM_942378 | 4590400 | 0.001671 |
| NM_006374 | 1820142 | 0.001563859 | NM_138931 | 4640044 | 0.00332 |
| NM_004793 | 1820341 | 0.003019033 | NM_003543 | 4730195 | 7.59E−05 |
| NM_001099786 | 1820598 | 5.51E−05 | CK300859 | 4730577 | 0.000937 |
| NM_019053 | 1940543 | 0.000574302 | NM_016553 | 4760543 | 0.000244 |
| NM_022746 | 1980082 | 0.002413999 | NM_012321 | 4830563 | 0.001969 |
| NM_017854 | 1980128 | 0.001725016 | NM_006725 | 4850192 | 0.001494 |
| NM_024108 | 1980424 | 0.000269838 | NM_016552 | 4850541 | 0.00067 |
| NM_015909 | 1990239 | 0.00242213 | NM_015239 | 4860132 | 0.003778 |
| NM_173659 | 1990673 | 0.002123792 | NM_032320 | 4860296 | 0.002987 |
| NM_012395 | 2000390 | 0.001723157 | NM_014281 | 4900053 | 0.000355 |
| NM_001007070 | 2000528 | 0.002734958 | NM_007047 | 4920577 | 0.003739 |
| NM_001040138 | 2000551 | 0.002124955 | NM_145032 | 5050653 | 0.003317 |
| NM_012155 | 2030450 | 0.001131432 | NM_003559 | 5090477 | 0.00048 |
| XM_936353 | 2030544 | 0.000436556 | NM_007355 | 5130082 | 0.003439 |
| NM_032138 | 2030747 | 0.001589073 | NM_003853 | 5130475 | 0.002923 |
| NM_017801 | 2070152 | 0.002309422 | NM_003221 | 5130553 | 0.002112 |
| NM_004886 | 2070180 | 0.00301557 | NM_005902 | 5130767 | 0.002581 |
| NM_153211 | 2070241 | 0.00214536 | CD243631 | 5270450 | 0.000608 |
| NM_012218 | 2070494 | 0.003219323 | NM_000075 | 5270500 | 0.001944 |
| NM_004226 | 2100035 | 0.000291753 | NM_032312 | 5290289 | 0.001788 |
| NM_016009 | 2100114 | 0.002945467 | NM_012387 | 5310653 | 0.001357 |
| NM_198196 | 2100333 | 0.000397523 | NM_001007239 | 5310754 | 0.003991 |
| NM_006469 | 2100519 | 0.001226435 | NM_003906 | 5390131 | 0.001975 |
| NM_207111 | 2190524 | 0.003034737 | NM_006321 | 5390669 | 0.000818 |
| NM_014738 | 2190673 | 0.000148025 | BX113537 | 5550270 | 0.001739 |
| NM_207113 | 2230008 | 0.002895049 | NM_152272 | 5550746 | 0.001593 |
| NM_005356 | 2230661 | 0.000848777 | NM_013270 | 5690037 | 0.000449 |
| XM_935843 | 2260446 | 0.003477913 | NM_032118 | 5700403 | 0.001594 |
| XM_929980 | 2320309 | 0.001681964 | NM_173791 | 5720398 | 0.00254 |
| BX389625 | 2340672 | 0.002548259 | NM_002808 | 5720497 | 0.000366 |
| NM_007115 | 2370524 | 3.63E−06 | NM_017570 | 5820348 | 0.001129 |
| AI217168 | 2450039 | 0.002173276 | BU733214 | 5860196 | 0.000376 |
| BX096685 | 2450343 | 0.003267165 | NM_021052 | 5860400 | 0.000553 |
| T03068 | 2450497 | 6.26E−05 | BM974838 | 5870300 | 0.000467 |
| NM_181803 | 2450603 | 0.003908882 | NM_006082 | 5900156 | 0.000428 |
| XM_942902 | 2470037 | 0.003729223 | NM_005548 | 5900414 | 0.001635 |
| NM_006031 | 2480082 | 0.000634806 | NM_178510 | 5910091 | 0.001985 |
| NM_001605 | 2490747 | 0.000549394 | XM_001131964 | 5910343 | 0.001426 |
| NM_003864 | 2510133 | 0.003923903 | NM_170699 | 5960035 | 0.001112 |
| AW578902 | 2510324 | 0.002258562 | NM_014230 | 6020402 | 0.002686 |
| NM_021174 | 2600255 | 0.00294174 | NM_032839 | 6020575 | 0.002106 |
| NM_031412 | 2630154 | 0.00084504 | NM_003645 | 6110328 | 0.00374 |
| NM_020408 | 2630181 | 0.003145589 | XM_931928 | 6110537 | 0.000484 |
| NM_003528 | 2630451 | 0.000567729 | NM_004044 | 6110768 | 0.000594 |
| NM_025153 | 2630484 | 3.78E−05 | NM_005968 | 6270021 | 0.00304 |
| NM_002012 | 2630500 | 0.002347566 | NM_000074 | 6270128 | 0.000132 |
| NM_005937 | 2630719 | 0.000937441 | NM_145043 | 6280168 | 0.0031 |
| NM_001361 | 2640220 | 0.002492929 | NM_001039508 | 6280754 | 0.001096 |
| NM_017955 | 2640278 | 0.002063204 | NM_003755 | 6290431 | 0.003648 |
| NM_001025603 | 2640373 | 0.002462316 | XM_936128 | 6290561 | 0.001469 |
| NM_005980 | 2640609 | 0.000121141 | NM_033416 | 6380598 | 0.000237 |
| XM_942031 | 2640674 | 0.003929341 | NM_025150 | 6480328 | 0.002394 |
| NM_020698 | 2650152 | 0.003163464 | NM_033554 | 6480500 | 0.000848 |
| NM_001008938 | 2650164 | 0.001504662 | NM_024619 | 6590386 | 0.000849 |
| NM_182811 | 2650390 | 0.001978998 | NM_001007224 | 6590523 | 0.001316 |
| NM_019111 | 2680370 | 0.000809719 | CB066794 | 6650482 | 0.00196 |
| NR_000011 | 2690019 | 0.003618358 | CA424950 | 6650576 | 0.00117 |
| NM_015705 | 2690576 | 0.002089479 | BG217842 | 6660056 | 0.002945 |
| NM_001014838 | 2690609 | 0.000394204 | NM_006825 | 6770348 | 0.002251 |
| NM_005412 | 2710278 | 0.000973254 | AA576740 | 6840408 | 0.002089 |
| NM_003059 | 2710397 | 0.000798795 | NM_015540 | 6860243 | 0.00369 |
| NM_001006109 | 2710544 | 0.001576273 | NM_004964 | 6940242 | 0.002499 |
| NM_149379 | 2710711 | 0.001530148 | M97723 | 6940246 | 0.001888 |
| NM_001018062 | 2750035 | 0.001855611 | NM_018384 | 6960746 | 0.000361 |
| NM_003707 | 2750408 | 0.000173267 | NM_004776 | 6980070 | 0.000499 |
| NM_015135 | 2750521 | 0.002379941 | BI915661 | 6980274 | 0.000463 |
| NM_006260 | 2760064 | 0.002457159 | NM_138576 | 7000133 | 0.00234 |
| NM_005449 | 2760092 | 0.000697751 | NM_025263 | 7000408 | 0.002421 |
| NM_017917 | 2760110 | 0.001041656 | NM_182476 | 7050543 | 0.002821 |
| NM_001414 | 2760563 | 0.002254449 | NM_078483 | 7100136 | 0.000439 |
| NM_016546 | 2760593 | 0.003435992 | NM_017481 | 7100392 | 0.001519 |
| XM_942424 | 2810113 | 0.003935666 | NM_006429 | 7150017 | 0.00141 |
| XM_942926 | 2810674 | 0.001067238 | NM_014165 | 7150601 | 0.00321 |
| NM_007357 | 2810767 | 0.002044085 | NM_006901 | 7150634 | 0.000284 |
| NM_001530 | 2850288 | 0.001070347 | NM_014976 | 7160296 | 0.001192 |
| NM_005082 | 2850576 | 0.00225625 | NM_003757 | 7320576 | 0.00123 |
| NM_001384 | 2900524 | 0.002064672 | NM_007167 | 7380274 | 0.00159 |
| XM_938382 | 2940687 | 0.003298392 | NM_016237 | 7380288 | 0.001302 |
| NM_006328 | 2970332 | 0.001255755 | NM_001923 | 7400121 | 0.001106 |
| XM_208281 | 2970537 | 0.003352045 | NM_001037161 | 7510224 | 0.002262 |
| NM_031488 | 3120301 | 0.00010759 | NM_001152 | 7550537 | 0.000158 |
| NM_032290 | 3120358 | 0.002207658 | NM_032717 | 7610546 | 0.001923 |
| NM_014234 | 3130019 | 0.00184518 | | | |
| NM_017905 | 3130091 | 0.000410653 | | | |
| NM_004555 | 3130291 | 0.003429029 | | | |
| NM_133445 | 3130328 | 0.002360218 | | | |
| XM_001127981 | 3130392 | 0.003717008 | | | |
| NM_000159 | 3130440 | 0.001054933 | | | |
| NM_020750 | 3130711 | 0.001628453 | | | |
| NM_016230 | 3140039 | 0.000502921 | | | |
| NM_205548 | 3140088 | 0.001001962 | | | |
| NM_006767 | 3140093 | 0.000556153 | | | |
| NM_001005738 | 3140114 | 0.003325508 | | | |
| NM_020925 | 3140142 | 0.000981628 | | | |
| NM_033111 | 3140246 | 0.000676403 | | | |
| NM_004666 | 3140382 | 0.001177473 | | | |
| NM_015710 | 3170092 | 0.000608449 | | | |
| NM_016089 | 3170468 | 0.002996763 | | | |
| NM_003569 | 3190382 | 0.003982714 | | | |
| NM_001417 | 3290066 | 0.003624032 | | | |
| NM_004177 | 3290192 | 0.002920888 | | | |
| NM_014941 | 3360364 | 4.62E−05 | | | |
| NM_020808 | 3370605 | 0.001106561 | | | |
| NM_005698 | 3370687 | 0.00068134 | | | |
| NM_003475 | 3390008 | 0.001688422 | | | |
| NM_170736 | 3390458 | 0.001780747 | | | |
| NM_000022 | 3400328 | 0.001987912 | | | |
| NM_015002 | 3400372 | 0.003532947 | | | |
| NM_000884 | 3400504 | 0.001547597 | | | |
| NM_006114 | 3400747 | 0.00311631 | | | |
| NM_207311 | 3420343 | 0.000374835 | | | |
| NM_001042600 | 3420630 | 0.000908756 | | | |
| NM_015722 | 3420682 | 0.00173225 | | | |
| NM_015288 | 3420735 | 0.000202788 | | | |
| XM_001126287 | 3440040 | 0.001256311 | | | |
| NM_019027 | 3440392 | 0.002462247 | | | |
| NM_012110 | 3440431 | 0.00061556 | | | |
| NM_006384 | 3440678 | 0.003916824 | | | |
| NM_139244 | 3460189 | 0.000136298 | | | |
| NM_003137 | 3460674 | 4.63E−05 | | | |
| NM_003707 | 3520082 | 5.68E−05 | | | |
| NM_213566 | 3520192 | 0.000197506 | | | |
| NM_005476 | 3610504 | 0.000612214 | | | |
| NM_002972 | 3610592 | 0.00378361 | | | |
| NM_020531 | 3610634 | 0.002777405 | | | |
| NM_002883 | 3710189 | 0.000834142 | | | |
| NM_001550 | 3780243 | 0.001234824 | | | |
| NM_001002010 | 3780689 | 0.000653229 | | | |
| NM_005746 | 3800243 | 0.000848799 | | | |
| XM_932678 | 3800253 | 0.001513587 | | | |
| NM_000648 | 3800270 | 0.002433762 | | | |
| NM_023080 | 3830278 | 0.001993755 | | | |
| XM_930898 | 3830390 | 0.000190429 | | | |
| NM_004092 | 3840022 | 0.000593345 | | | |
| NM_139353 | 3850025 | 0.002667216 | | | |
| AA775557 | 3850427 | 0.00394886 | | | |
| NM_020169 | 3850669 | 0.003662045 | | | |
| NM_024326 | 3930687 | 0.001557261 | | | |
| BF514306 | 3930730 | 0.002820857 | | | |
| CF887308 | 3940020 | 0.001121382 | | | |
| NM_005225 | 3940338 | 0.000175382 | | | |
| XM_940524 | 3940368 | 0.00018048 | | | |
| NM_000849 | 3940386 | 0.003231457 | | | |
| BX111927 | 3940719 | 0.003191008 | | | |
| NM_012111 | 3990192 | 0.003659032 | | | |
| NM_000717 | 3990296 | 0.003459719 | | | |
| NM_080387 | 3990328 | 0.001993999 | | | |
| XM_496059 | 3990465 | 0.00356289 | | | |
| X00437 | 3990639 | 7.12E−05 | | | |
| NM_003642 | 4010037 | 0.003239707 | | | |
| NM_007292 | 4010048 | 0.001936058 | | | |
| NM_022555 | 4010053 | 0.00335759 | | | |
| XM_935153 | 4010376 | 0.001635832 | | | |
| NM_015490 | 4010673 | 0.00148135 | | | |
| NM_030666 | 4040221 | 0.002048933 | | | |
| NM_002635 | 4050398 | 0.003256498 | | | |
| NM_153329 | 4050411 | 0.001159523 | | | |
| NM_015054 | 4060056 | 0.001049744 | | | |
| NM_004811 | 4060131 | 0.00131301 | | | |
| NM_030915 | 4120086 | 0.000447417 | | | |
| NM_022827 | 4120133 | 0.000261626 | | | |
| AI961125 | 4120300 | 0.003877031 | | | |
| NM_001779 | 4150161 | 0.000305178 | | | |
| AA868051 | 4150402 | 0.000382702 | | | |
| NM_002756 | 4150632 | 0.00379019 | | | |
| AK094576 | 4150685 | 0.00291364 | | | |
| NM_016091 | 4180142 | 0.003057291 | | | |
| XM_378421 | 4200148 | 0.003029156 | | | |
| XM_068632 | 4200451 | 0.002981363 | | | |
| NM_015721 | 4200538 | 0.00049509 | | | |
| NM_052931 | 4210427 | 0.00232312 | | | |
| NM_024600 | 4210647 | 0.000576166 | | | |
| NM_001042631 | 4220138 | 0.000174952 | | | |
| NM_002496 | 4220181 | 0.00251572 | | | |
| NM_139247 | 4230653 | 0.00137609 | | | |
| NM_003329 | 4260048 | 0.000816898 | | | |
| NM_183384 | 4280047 | 0.001150178 | | | |
| NM_020414 | 4280332 | 4.19E−05 | | | |
| NM_003174 | 4280373 | 0.000909028 | | | |
| NM_201429 | 4280463 | 0.002924506 | | | |
| NM_138554 | 4390615 | 0.001546583 | | | |
| NM_015651 | 4540082 | 0.000227384 | | | |
| NM_015433 | 4540301 | 0.00135408 | | | |
| NM_005139 | 4560133 | 0.002038022 | | | |
| BU752667 | 4560703 | 0.001380314 | | | |
| NM_198955 | 4570270 | 0.003438209 | | | |
| NM_198334 | 4570291 | 0.003016726 | | | |
| NM_006445 | 4590082 | 0.001400851 | | | |
| XM_942378 | 4590400 | 0.001015945 | | | |
| NM_001024667 | 4590646 | 0.001784918 | | | |
| NM_138931 | 4640044 | 0.001002776 | | | |
| NM_016284 | 4640064 | 0.001555432 | | | |
| NM_025228 | 4640528 | 0.002755512 | | | |
| NM_003543 | 4730195 | 8.13E−05 | | | |
| CK300859 | 4730577 | 0.001164046 | | | |
| NM_001017404 | 4760364 | 0.00086931 | | | |
| BU678343 | 4760445 | 0.003877856 | | | |
| NM_016553 | 4760543 | 9.71E−05 | | | |
| XM_001132754 | 4760687 | 0.003728828 | | | |
| NM_012413 | 4780672 | 0.000392075 | | | |
| NM_030811 | 4830435 | 0.001353019 | | | |
| NM_012321 | 4830563 | 0.000506437 | | | |
| NM_006725 | 4850192 | 0.000206863 | | | |
| NM_021809 | 4850438 | 0.001489653 | | | |
| NM_016552 | 4850541 | 0.000202396 | | | |
| XR_015190 | 4850577 | 0.003201678 | | | |
| NM_015239 | 4860132 | 0.000272212 | | | |
| NM_032320 | 4860296 | 0.000460487 | | | |
| NM_024092 | 4880364 | 0.001637988 | | | |
| NM_007171 | 4880681 | 0.003559778 | | | |
| NM_014281 | 4900053 | 6.86E−05 | | | |
| XM_946033 | 4900398 | 0.003852797 | | | |
| NM_182648 | 4920204 | 0.002893378 | | | |
| NM_007047 | 4920577 | 0.000118817 | | | |
| NM_006429 | 5050390 | 0.003642586 | | | |
| NM_145032 | 5050653 | 0.002836002 | | | |
| NM_018079 | 5080056 | 0.002244797 | | | |
| NM_015702 | 5090204 | 0.000530347 | | | |
| NM_019082 | 5090315 | 0.003879352 | | | |
| NM_003559 | 5090477 | 0.002426536 | | | |
| NM_007355 | 5130082 | 0.000507106 | | | |
| NM_001001998 | 5130142 | 0.00324581 | | | |
| NM_003853 | 5130475 | 0.001892525 | | | |
| NM_003221 | 5130553 | 0.003758113 | | | |
| BU587445 | 5130747 | 0.002848837 | | | |
| NM_005902 | 5130767 | 0.001239305 | | | |
| CD693563 | 5260184 | 0.003778182 | | | |
| CD243631 | 5270450 | 0.003378173 | | | |
| NM_000075 | 5270500 | 0.000777457 | | | |
| NM_032312 | 5290289 | 0.000171985 | | | |
| NM_022730 | 5310050 | 0.000698859 | | | |
| NM_001033667 | 5310136 | 0.00070147 | | | |
| BM967229 | 5310491 | 0.003690525 | | | |
| NM_012387 | 5310653 | 0.001724346 | | | |
| NM_001007239 | 5310754 | 0.000720299 | | | |
| AW137762 | 5360605 | 0.002613326 | | | |
| NM_178232 | 5360674 | 0.002347543 | | | |
| NM_015713 | 5390100 | 0.001513478 | | | |
| NM_003906 | 5390131 | 0.000534436 | | | |
| NM_006321 | 5390669 | 0.000373269 | | | |
| NM_000852 | 5420538 | 0.003424397 | | | |
| NM_001001998 | 5490142 | 0.001318278 | | | |
| BX113537 | 5550270 | 0.000602119 | | | |
| NM_152272 | 5550746 | 0.000390033 | | | |
| NM_015374 | 5570750 | 0.002013191 | | | |
| NM_145641 | 5670274 | 0.002947167 | | | |
| NM_005500 | 5690008 | 0.002641662 | | | |
| NM_013270 | 5690037 | 1.52E−05 | | | |
| NM_002923 | 5690500 | 0.001875206 | | | |
| NM_015295 | 5700136 | 0.003952799 | | | |
| NM_032118 | 5700403 | 0.000288965 | | | |
| NM_152781 | 5720241 | 0.002672592 | | | |
| NM_173791 | 5720398 | 0.000248591 | | | |
| NM_004585 | 5720458 | 0.00115038 | | | |
| NM_002808 | 5720497 | 0.003488212 | | | |
| NM_006496 | 5810598 | 0.002808295 | | | |
| AK124463 | 5820193 | 0.003209454 | | | |
| NM_017570 | 5820348 | 0.002081433 | | | |
| NM_003517 | 5860075 | 0.003754375 | | | |
| BU733214 | 5860196 | 0.000364513 | | | |
| NM_021052 | 5860400 | 0.002190221 | | | |
| BM974838 | 5870300 | 0.001445267 | | | |
| NM_004688 | 5870673 | 0.002373528 | | | |
| NM_014141 | 5890273 | 0.00324783 | | | |
| NM_001628 | 5890327 | 0.001535147 | | | |
| NM_139346 | 5890333 | 0.00225591 | | | |
| BF515836 | 5890367 | 0.002109692 | | | |
| NM_012257 | 5890494 | 0.001864531 | | | |
| NM_006082 | 5900156 | 0.000375351 | | | |
| NM_005548 | 5900414 | 0.001907528 | | | |
| NM_178510 | 5910091 | 0.000845559 | | | |
| XM_001131964 | 5910343 | 0.003184919 | | | |
| NM_170699 | 5960035 | 0.000747224 | | | |
| BC042086 | 5960041 | 0.002811752 | | | |
| NM_198155 | 5960301 | 0.003718535 | | | |
| BX106383 | 5960605 | 0.003070225 | | | |
| NM_014230 | 6020402 | 0.000851431 | | | |
| NM_024923 | 6020500 | 0.000973997 | | | |
| NM_032839 | 6020575 | 0.0020313 | | | |
| NM_024586 | 6020685 | 0.003956754 | | | |
| NM_007255 | 6100220 | 0.00044726 | | | |
| NM_005384 | 6100228 | 0.003034655 | | | |
| NM_144666 | 6110142 | 0.003236599 | | | |
| NM_173855 | 6110228 | 0.001661001 | | | |
| NM_003645 | 6110328 | 0.001511842 | | | |
| XM_931928 | 6110537 | 0.000299892 | | | |
| NM_004044 | 6110768 | 4.01E−05 | | | |
| NM_015645 | 6200537 | 0.001302971 | | | |
| NM_032376 | 6200746 | 0.002230955 | | | |
| NM_152371 | 6250338 | 0.003724521 | | | |
| BX509313 | 6250446 | 0.003448153 | | | |
| NM_005968 | 6270021 | 0.001086758 | | | |
| NM_000074 | 6270128 | 0.000192081 | | | |
| XM_373742 | 6270215 | 0.001519125 | | | |
| NM_015044 | 6270364 | 0.00160149 | | | |
| XM_926048 | 6270630 | 0.003286242 | | | |
| NM_145043 | 6280168 | 0.000975169 | | | |
| NM_002964 | 6280576 | 0.003250053 | | | |
| NM_001039508 | 6280754 | 0.000581847 | | | |
| NM_182776 | 6290239 | 0.001296353 | | | |
| NM_003755 | 6290431 | 0.000523562 | | | |
| XM_936128 | 6290561 | 0.000249876 | | | |
| NM_021729 | 6330634 | 0.001548462 | | | |
| NM_005176 | 6350360 | 0.002665168 | | | |
| NM_002704 | 6350364 | 0.000588169 | | | |
| XM_001133111 | 6370463 | 0.003426341 | | | |
| NM_033301 | 6380148 | 0.001271429 | | | |
| NM_033416 | 6380598 | 0.000273072 | | | |
| NM_006242 | 6400064 | 0.002831603 | | | |
| XM_937796 | 6420079 | 0.003830659 | | | |
| XM_941861 | 6420364 | 0.002694945 | | | |
| AK128384 | 6420541 | 0.001626681 | | | |
| NM_001005332 | 6480170 | 0.000830344 | | | |
| NM_025150 | 6480328 | 0.002432027 | | | |
| NM_033554 | 6480500 | 0.000219146 | | | |
| XM_942392 | 6520333 | 0.002214859 | | | |
| XR_018793 | 6550142 | 0.000948425 | | | |
| NM_001040273 | 6550762 | 0.000957827 | | | |
| NM_006164 | 6580075 | 0.001078714 | | | |
| NM_024619 | 6590386 | 5.24E−05 | | | |
| NM_001007224 | 6590523 | 0.000585053 | | | |
| NM_001098522 | 6620674 | 0.003280444 | | | |
| NM_016057 | 6650403 | 0.003327506 | | | |
| CB066794 | 6650482 | 0.0035975 | | | |
| NM_176880 | 6650541 | 0.001086482 | | | |
| CA424950 | 6650576 | 0.002264901 | | | |
| BG217842 | 6660056 | 0.002557216 | | | |
| NM_170738 | 6660471 | 0.002504976 | | | |
| NM_144779 | 6760487 | 0.003961723 | | | |
| NM_002513 | 6770142 | 0.002174419 | | | |
| NM_006825 | 6770348 | 0.002982567 | | | |
| NR_003141 | 6840162 | 0.003273231 | | | |
| AA576740 | 6840408 | 0.001433899 | | | |
| NM_015540 | 6860243 | 0.001782592 | | | |
| NM_004964 | 6940242 | 0.000665532 | | | |
| M97723 | 6940246 | 0.001381266 | | | |
| NM_020739 | 6960707 | 0.003629462 | | | |
| NM_018384 | 6960746 | 5.22E−05 | | | |
| NM_004776 | 6980070 | 0.000266672 | | | |
| BI915661 | 6980274 | 0.001185832 | | | |
| NM_178839 | 6980609 | 0.000512619 | | | |
| NM_138576 | 7000133 | 0.000740281 | | | |
| NM_025263 | 7000408 | 0.000816131 | | | |
| NM_017773 | 7000768 | 0.000646156 | | | |
| NM_182476 | 7050543 | 0.000184808 | | | |
| NM_078483 | 7100136 | 0.000534399 | | | |
| NM_017481 | 7100392 | 0.001066642 | | | |
| NM_004623 | 7100504 | 0.003389243 | | | |
| NM_006429 | 7150017 | 0.000296967 | | | |
| NM_014165 | 7150601 | 0.003091321 | | | |
| NM_006901 | 7150634 | 0.000149288 | | | |
| NM_199184 | 7160164 | 0.000694721 | | | |
| NM_014976 | 7160296 | 0.000427807 | | | |
| NM_022897 | 7160554 | 0.001213173 | | | |
| NM_023079 | 7160767 | 0.003879834 | | | |
| NM_016623 | 7200309 | 0.001773618 | | | |
| NM_014290 | 7200682 | 0.002665113 | | | |
| NM_020706 | 7320273 | 0.003344678 | | | |
| NM_003757 | 7320576 | 0.000763179 | | | |
| NM_002566 | 7330487 | 0.000974266 | | | |
| NM_174856 | 7380170 | 0.002502096 | | | |
| NM_007167 | 7380274 | 0.002577653 | | | |
| NM_016237 | 7380288 | 0.000208665 | | | |
| NM_021805 | 7380328 | 0.001162491 | | | |
| NM_005787 | 7380347 | 0.003780243 | | | |
| NM_024850 | 7380440 | 0.000888724 | | | |
| NM_199176 | 7380736 | 0.002901909 | | | |
| NM_001923 | 7400121 | 0.002348098 | | | |
| NM_000488 | 7400240 | 0.002065936 | | | |
| NM_001037161 | 7510224 | 0.002565068 | | | |
| NM_001152 | 7550537 | 9.37E−05 | | | |
| NM_006537 | 7570112 | 0.00303031 | | | |
| NM_032717 | 7610546 | 0.001864573 | | | |
| NM_024422 | 7650025 | 0.000910298 | | | |
| NM_024681 | 7650605 | 0.000419543 | | | |

| | |
|---|---|
| List 50 | List 51 |

| AUC | | 0.87 | | | 0.81 |
|---|---|---|---|---|---|
| Number of | | 436 | | | 597 |
| Transcripts | | | | | |
| Acc.-No. | Probe ID | p-Value | Acc.-No. | Probe ID | p-Value |
| NM_000574 | 10025 | 0.004739 | NM_000574 | 10025 | 0.001655 |
| NM_177972 | 10142 | 0.001456 | NM_022736 | 10086 | 0.002912 |
| NM_001031717 | 10338 | 0.002688 | XM_931749 | 10110 | 0.002224 |
| NM_023003 | 10541 | 0.001509 | NM_177972 | 10142 | 0.001018 |
| NM_006152 | 20553 | 0.002204 | NM_005621 | 10279 | 0.000319 |
| NM_015062 | 20647 | 0.001282 | NM_001031717 | 10338 | 0.001964 |
| NM_004411 | 50168 | 0.003444 | NM_023003 | 10541 | 0.000152 |
| NM_006369 | 50240 | 0.002043 | NM_145799 | 20154 | 0.001891 |
| NR_002196 | 50347 | 0.001049 | NM_206967 | 20224 | 0.000148 |
| NM_001005920 | 60328 | 0.001591 | NM_006152 | 20553 | 0.001468 |
| NM_001261 | 60468 | 0.003793 | NM_015062 | 20647 | 0.000191 |
| NM_052901 | 130113 | 0.004493 | NM_014669 | 50164 | 0.001352 |
| NM_006567 | 130403 | 0.001951 | NM_006369 | 50240 | 0.003857 |
| NM_021078 | 130451 | 0.003205 | NM_001261 | 60468 | 0.003924 |
| NM_022136 | 150632 | 0.002125 | NM_003626 | 110576 | 0.003117 |
| NM_182898 | 160132 | 0.000251 | NM_052901 | 130113 | 0.002067 |
| NM_012426 | 160682 | 0.001499 | NM_006567 | 130403 | 0.001647 |
| NM_016292 | 160736 | 0.001811 | NM_021078 | 130451 | 0.000794 |
| BM981444 | 240653 | 0.002952 | NM_139250 | 130605 | 0.001562 |
| NM_013378 | 360066 | 0.002782 | NM_022136 | 150632 | 0.001427 |
| NM_018382 | 360168 | 0.004714 | XM_932547 | 160121 | 0.003231 |
| NM_005103 | 360343 | 0.002696 | NM_182898 | 160132 | 0.000213 |
| NM_022830 | 360402 | 0.003526 | NM_005804 | 160240 | 0.001723 |
| NM_016120 | 360450 | 0.004653 | NM_006392 | 160279 | 0.004391 |
| NM_003971 | 380541 | 0.004902 | NM_012426 | 160682 | 0.000377 |
| NM_015953 | 380685 | 0.003827 | NM_016292 | 160736 | 9.71E−05 |
| XM_929457 | 380762 | 0.002276 | NM_000902 | 240608 | 0.002095 |
| NM_002348 | 450037 | 0.000325 | NM_014767 | 270341 | 0.004498 |
| NM_194260 | 460273 | 0.0003 | XM_933693 | 270768 | 0.002664 |
| NM_004424 | 460326 | 0.004378 | NM_213674 | 290452 | 0.002842 |
| NM_021872 | 460754 | 0.001971 | NM_006433 | 290743 | 0.004807 |
| NM_018715 | 510450 | 9.61E−05 | NM_013378 | 360066 | 0.004706 |
| NM_000155 | 520332 | 0.000228 | NM_206831 | 360187 | 0.003981 |
| NM_020448 | 520360 | 0.004462 | NM_005103 | 360343 | 0.002573 |
| NM_012229 | 520647 | 0.004717 | NM_181704 | 360392 | 0.004822 |
| NM_016616 | 580050 | 0.00182 | NM_022830 | 360402 | 0.002853 |
| NM_024677 | 610068 | 0.00404 | NM_015959 | 380315 | 0.002218 |
| NM_015074 | 610465 | 0.003167 | NM_003971 | 380541 | 0.002112 |
| NM_002129 | 610563 | 0.000746 | NM_015953 | 380685 | 0.000244 |
| NM_004928 | 610653 | 0.002308 | NM_012212 | 430100 | 0.001931 |
| NM_002896 | 620722 | 0.001368 | NM_002348 | 450037 | 0.000158 |
| NM_000896 | 650164 | 0.000219 | NM_016025 | 460142 | 0.000869 |
| NM_002727 | 650541 | 0.002564 | NM_021872 | 460754 | 0.000351 |
| NM_006243 | 650767 | 0.003306 | NM_018715 | 510450 | 5.75E−05 |
| CR596519 | 670041 | 0.000556 | AK130294 | 520154 | 0.001649 |
| NM_182830 | 670376 | 0.00478 | NM_000155 | 520332 | 2.00E−05 |
| NM_001517 | 730543 | 0.00241 | NM_020448 | 520360 | 0.002503 |
| NM_016524 | 730725 | 0.00196 | NM_003960 | 520564 | 0.003828 |
| XR_015582 | 770452 | 0.001367 | NM_012229 | 520647 | 0.004436 |
| NM_001398 | 770458 | 0.002653 | NM_016616 | 580050 | 0.004964 |
| NM_002965 | 830400 | 0.003422 | NM_024677 | 610068 | 0.004321 |
| CA429313 | 840139 | 0.002331 | NM_005134 | 610408 | 0.001924 |
| NM_021090 | 840564 | 0.004677 | NM_015074 | 610465 | 0.003321 |
| NM_199337 | 840730 | 0.001996 | NM_002129 | 610563 | 0.000424 |
| NM_014873 | 870403 | 0.003279 | NM_004928 | 610653 | 0.001533 |
| NM_014358 | 940754 | 0.003102 | NM_002896 | 620722 | 0.000361 |
| NM_015380 | 990273 | 0.002688 | NM_003518 | 630091 | 0.004957 |
| NM_012252 | 990377 | 0.001966 | NM_024662 | 630768 | 0.004708 |
| NM_173608 | 1010220 | 0.003747 | CF619198 | 650014 | 0.002372 |
| AA335815 | 1010671 | 0.002966 | NM_000896 | 650164 | 2.29E−05 |
| NM_020803 | 1010754 | 0.004556 | BQ185068 | 650343 | 0.001602 |
| NM_004927 | 1030692 | 0.004611 | NM_000485 | 650358 | 0.002432 |
| AF272739 | 1050128 | 0.000586 | NM_002727 | 650541 | 0.002569 |
| NM_198157 | 1050360 | 0.003341 | NM_006243 | 650767 | 0.003445 |
| AW236020 | 1070131 | 0.003413 | CR596519 | 670041 | 5.24E−05 |
| NM_006608 | 1070189 | 0.00296 | XM_929135 | 670358 | 0.00216 |
| NM_024949 | 1070348 | 0.001835 | NM_182830 | 670376 | 0.000701 |
| NM_207107 | 1070377 | 0.001853 | NM_001517 | 730543 | 0.001257 |
| NM_153611 | 1090048 | 0.002929 | NM_025113 | 730632 | 0.001199 |
| XM_930650 | 1090102 | 0.004048 | NM_016524 | 730725 | 0.001022 |
| NM_016464 | 1090139 | 0.002779 | XR_015582 | 770452 | 0.002134 |
| NM_015292 | 1110215 | 0.000501 | NM_001398 | 770458 | 0.003298 |
| BC041984 | 1110358 | 0.002383 | NM_017726 | 780332 | 0.001404 |
| BM679696 | 1110537 | 0.00371 | XM_374110 | 780437 | 0.001677 |
| NM_003793 | 1110538 | 0.002744 | NM_002965 | 830400 | 0.002023 |
| NM_006720 | 1110575 | 0.001923 | NM_006427 | 830754 | 0.000392 |
| NM_000878 | 1170307 | 0.003781 | NM_003329 | 830762 | 0.001848 |
| NM_006576 | 1240070 | 0.002371 | CA429313 | 840139 | 0.003554 |
| NM_000887 | 1240603 | 0.000255 | NM_031212 | 840379 | 0.004259 |
| NM_021105 | 1260228 | 0.000814 | BF678255 | 840463 | 0.00467 |
| XM_377476 | 1340338 | 0.001954 | NM_199337 | 840730 | 0.000684 |
| NM_001039708 | 1340731 | 0.004319 | NM_014873 | 870403 | 0.004816 |
| NM_004716 | 1400270 | 0.003217 | NM_182597 | 870592 | 0.004434 |
| NM_016286 | 1410369 | 0.00052 | NM_007103 | 940224 | 0.004532 |
| NM_014853 | 1410400 | 0.003891 | NM_012198 | 940348 | 0.00252 |
| NM_001040034 | 1430133 | 0.004887 | NM_001013706 | 940450 | 0.002878 |
| NM_000578 | 1430292 | 0.000584 | XM_939144 | 940706 | 0.001223 |
| NM_007199 | 1430762 | 0.001161 | NM_014358 | 940754 | 0.00282 |
| NM_001716 | 1440291 | 0.004305 | NM_020131 | 990224 | 0.002019 |
| NM_003343 | 1440382 | 0.001825 | NM_015380 | 990273 | 0.000896 |
| NM_002080 | 1440546 | 0.002679 | NM_173608 | 1010220 | 0.002887 |
| NM_016408 | 1440601 | 0.0009 | NM_001376 | 1010301 | 0.00417 |
| NM_001039571 | 1440612 | 0.004603 | NM_004104 | 1010398 | 0.002174 |
| NM_021117 | 1450082 | 0.003077 | NM_031206 | 1010612 | 0.004203 |
| NM_001686 | 1450706 | 0.002817 | NM_021209 | 1030041 | 0.003497 |
| CR593212 | 1470040 | 0.003014 | NM_004927 | 1030692 | 0.001364 |
| NM_001037325 | 1470332 | 0.000876 | AF272739 | 1050128 | 0.000316 |
| CB240909 | 1470372 | 0.002717 | NM_006608 | 1070189 | 0.002799 |
| NM_014428 | 1470750 | 0.004404 | NM_207107 | 1070377 | 0.004333 |
| NM_006306 | 1500040 | 0.003999 | NM_153611 | 1090048 | 0.001324 |
| NM_003855 | 1500328 | 0.002353 | NM_015292 | 1110215 | 5.97E−05 |
| NM_000314 | 1500717 | 0.003704 | BC041984 | 1110358 | 0.001541 |
| NM_004608 | 1570056 | 0.004765 | NM_003793 | 1110538 | 0.00286 |
| AI798732 | 1570703 | 0.004924 | NM_006720 | 1110575 | 0.000394 |
| NM_015039 | 1580348 | 0.000158 | NM_000878 | 1170307 | 0.002666 |
| BX114980 | 1660204 | 0.003081 | NM_080649 | 1190647 | 0.004417 |
| BX101820 | 1690504 | 0.000107 | NM_006576 | 1240070 | 0.003339 |
| NM_002405 | 1710286 | 0.000137 | NM_000887 | 1240603 | 0.000241 |
| NM_003375 | 1770379 | 0.002947 | NM_021105 | 1260228 | 0.000289 |
| NM_020940 | 1770598 | 0.004365 | NM_014861 | 1300332 | 0.004029 |
| NM_001024912 | 1780152 | 0.004364 | NM_006066 | 1300768 | 0.001774 |
| NM_018285 | 1780348 | 0.000257 | XM_377476 | 1340338 | 0.001862 |
| NM_001099786 | 1820598 | 0.000418 | NM_001039708 | 1340731 | 0.001309 |
| NM_001018052 | 1850433 | 0.00434 | NM_004716 | 1400270 | 0.001345 |
| NM_019053 | 1940543 | 0.001551 | NM_016286 | 1410369 | 0.000395 |
| NM_016839 | 1980092 | 0.002857 | NM_014853 | 1410400 | 0.004221 |
| NM_024108 | 1980424 | 0.001579 | NM_001040034 | 1430133 | 0.00278 |
| NM_024659 | 1990450 | 0.004876 | CA446851 | 1430242 | 0.004861 |
| NM_173659 | 1990673 | 0.003102 | NM_000578 | 1430292 | 0.000338 |
| NM_002365 | 1990703 | 0.003535 | NM_004629 | 1430451 | 0.001402 |
| NM_005184 | 1990762 | 0.001397 | NM_007199 | 1430762 | 0.001102 |
| NM_012395 | 2000390 | 0.000425 | NM_001716 | 1440291 | 0.000503 |
| BM272556 | 2000474 | 0.003138 | NM_003343 | 1440382 | 0.001575 |
| NM_001040138 | 2000551 | 0.001316 | NM_020230 | 1440487 | 0.003475 |
| NM_012155 | 2030450 | 0.002936 | NM_002080 | 1440546 | 0.000463 |
| AA628808 | 2030543 | 0.00328 | NM_016408 | 1440601 | 0.001613 |
| XM_936353 | 2030544 | 0.002128 | AW519230 | 1440717 | 0.002048 |
| NM_032138 | 2030747 | 0.003784 | NM_021117 | 1450082 | 0.004308 |
| NM_017801 | 2070152 | 0.003627 | NM_198578 | 1450523 | 0.002261 |
| NM_175887 | 2070201 | 0.002794 | CR593212 | 1470040 | 0.004804 |
| NM_004226 | 2100035 | 0.000859 | CA314866 | 1470541 | 0.003164 |
| NM_017758 | 2100221 | 0.000121 | NM_006306 | 1500040 | 0.001727 |
| NM_198196 | 2100333 | 0.00369 | NM_003855 | 1500328 | 0.003176 |
| NM_006469 | 2100519 | 0.002129 | NM_000314 | 1500717 | 0.000587 |
| CK299581 | 2120356 | 0.000303 | NM_001034833 | 1510224 | 0.004374 |
| NM_001077692 | 2120681 | 0.003489 | AI798732 | 1570703 | 0.004074 |
| NM_001005389 | 2140242 | 0.00442 | NM_015039 | 1580348 | 0.000205 |
| NM_207111 | 2190524 | 0.002054 | NM_001278 | 1580750 | 0.004493 |
| NM_014738 | 2190673 | 0.000185 | NM_003914 | 1660309 | 0.003883 |
| AI537683 | 2230594 | 0.002292 | NM_153201 | 1690189 | 0.002222 |
| NM_005356 | 2230661 | 0.003648 | BX101820 | 1690504 | 0.00152 |
| CB123670 | 2260128 | 0.00484 | CA429381 | 1690767 | 0.003696 |
| XM_935843 | 2260446 | 0.000153 | NM_018054 | 1710100 | 0.001266 |
| XM_932015 | 2370341 | 0.002144 | NM_006424 | 1710189 | 0.002326 |
| NM_007115 | 2370524 | 3.72E−06 | NM_002405 | 1710286 | 0.000516 |
| BQ372445 | 2370681 | 0.000584 | NM_014871 | 1740576 | 0.002417 |
| AI217168 | 2450039 | 0.001595 | NM_006888 | 1780035 | 0.004676 |
| BX096685 | 2450343 | 0.001624 | NM_018285 | 1780348 | 0.000158 |
| T03068 | 2450497 | 0.000721 | XM_940071 | 1780368 | 0.003104 |
| NM_181803 | 2450603 | 0.000989 | NM_006374 | 1820142 | 0.001564 |
| NM_024798 | 2470341 | 0.004535 | NM_004793 | 1820341 | 0.003019 |
| NM_001605 | 2490747 | 0.003443 | NM_001099786 | 1820598 | 5.51E−05 |
| NM_031412 | 2630154 | 0.001573 | NM_019053 | 1940543 | 0.000574 |
| NM_020408 | 2630181 | 0.001285 | NM_022746 | 1980082 | 0.002414 |
| NM_003528 | 2630451 | 0.000937 | NM_017854 | 1980128 | 0.001725 |
| NM_025153 | 2630484 | 0.000145 | BF224068 | 1980356 | 0.00449 |
| NM_002012 | 2630500 | 0.00324 | NM_024108 | 1980424 | 0.00027 |
| NM_005937 | 2630719 | 0.002777 | NM_015909 | 1990239 | 0.002422 |
| NM_001361 | 2640220 | 0.004705 | NM_173659 | 1990673 | 0.002124 |
| NM_005980 | 2640609 | 0.000931 | NM_012395 | 2000390 | 0.001723 |
| NM_019111 | 2680370 | 0.003073 | NM_001007070 | 2000528 | 0.002735 |
| NM_015705 | 2690576 | 0.003107 | NM_001040138 | 2000551 | 0.002125 |
| NM_001014838 | 2690609 | 0.000645 | NM_012155 | 2030450 | 0.001131 |
| XM_001129302 | 2710168 | 0.003266 | XM_936353 | 2030544 | 0.000437 |
| NM_005412 | 2710278 | 0.003406 | NM_032138 | 2030747 | 0.001589 |
| NM_003059 | 2710397 | 0.002168 | NM_031420 | 2070131 | 0.004231 |
| NM_000477 | 2710427 | 0.002062 | NM_017801 | 2070152 | 0.002309 |
| NM_001018062 | 2750035 | 0.002623 | NM_004886 | 2070180 | 0.003016 |
| NM_001854 | 2750070 | 0.000658 | NM_153211 | 2070241 | 0.002145 |
| NM_003707 | 2750408 | 0.00087 | NM_012218 | 2070494 | 0.003219 |
| NM_001961 | 2750626 | 0.003016 | NM_004226 | 2100035 | 0.000292 |
| NM_005449 | 2760092 | 0.003797 | NM_016009 | 2100114 | 0.002945 |
| NM_000721 | 2760452 | 0.00413 | NM_017758 | 2100221 | 0.004417 |
| XM_376822 | 2760543 | 0.004267 | NM_198196 | 2100333 | 0.000398 |
| NM_001414 | 2760563 | 0.003576 | NM_006469 | 2100519 | 0.001226 |
| NM_016546 | 2760593 | 0.003162 | NM_001040169 | 2120400 | 0.004033 |
| H22000 | 2810500 | 0.004777 | NM_207111 | 2190524 | 0.003035 |
| BG188859 | 2810630 | 0.004233 | NM_014738 | 2190673 | 0.000148 |
| NM_007357 | 2810767 | 0.00473 | NM_207113 | 2230008 | 0.002895 |
| NM_005082 | 2850576 | 0.002305 | NM_005356 | 2230661 | 0.000849 |
| NM_001384 | 2900524 | 0.001359 | NM_002357 | 2260239 | 0.004678 |
| NM_003553 | 2940053 | 0.002948 | XM_935843 | 2260446 | 0.003478 |
| NM_006328 | 2970332 | 0.004953 | XM_929980 | 2320309 | 0.001682 |
| NM_014675 | 2970440 | 0.004433 | BX389625 | 2340672 | 0.002548 |
| NM_033259 | 3060537 | 0.004042 | BX089851 | 2350671 | 0.004844 |
| NM_032491 | 3120181 | 0.00276 | NM_007115 | 2370524 | 3.63E−06 |
| NM_031488 | 3120301 | 0.000158 | NM_016478 | 2370593 | 0.004147 |
| NM_017905 | 3130091 | 0.001142 | AI217168 | 2450039 | 0.002173 |
| NM_004555 | 3130291 | 0.001592 | BX096685 | 2450343 | 0.003267 |
| NM_016230 | 3140039 | 0.001651 | T03068 | 2450497 | 6.26E−05 |
| NM_205548 | 3140088 | 0.000507 | NM_181803 | 2450603 | 0.003909 |
| NM_006767 | 3140093 | 0.001209 | XM_942902 | 2470037 | 0.003729 |
| NM_020925 | 3140142 | 0.002377 | NM_006031 | 2480082 | 0.000635 |
| NM_033111 | 3140246 | 0.000989 | NM_001605 | 2490747 | 0.000549 |
| NM_015710 | 3170092 | 0.001023 | NM_003864 | 2510133 | 0.003924 |
| NM_016089 | 3170468 | 0.004315 | AW578902 | 2510324 | 0.002259 |
| BX111143 | 3180440 | 0.004538 | NM_021174 | 2600255 | 0.002942 |
| XM_936295 | 3180523 | 0.002392 | NM_031412 | 2630154 | 0.000845 |
| CB046255 | 3310075 | 0.000367 | NM_020408 | 2630181 | 0.003146 |
| BI260057 | 3310341 | 0.000518 | NM_003528 | 2630451 | 0.000568 |
| NM_014941 | 3360364 | 4.61E−05 | NM_025153 | 2630484 | 3.78E−05 |
| NM_020808 | 3370605 | 0.002185 | NM_002012 | 2630500 | 0.002348 |
| NM_005698 | 3370687 | 0.000458 | NM_005937 | 2630719 | 0.000937 |
| NM_003475 | 3390008 | 0.002397 | NM_001361 | 2640220 | 0.002493 |
| NM_170736 | 3390458 | 0.002464 | NM_017955 | 2640278 | 0.002063 |
| NM_000884 | 3400504 | 0.004247 | NM_001025603 | 2640373 | 0.002462 |
| NM_207311 | 3420343 | 0.00322 | NM_005980 | 2640609 | 0.000121 |
| NM_001042600 | 3420630 | 0.004458 | XM_942031 | 2640674 | 0.003929 |
| NM_015288 | 3420735 | 0.001555 | NM_020698 | 2650152 | 0.003163 |
| XM_001126287 | 3440040 | 0.002183 | NM_001008938 | 2650164 | 0.001505 |
| NM_012110 | 3440431 | 0.001984 | NM_182811 | 2650390 | 0.001979 |
| NM_058163 | 3440463 | 0.004224 | NM_019111 | 2680370 | 0.00081 |
| NM_139244 | 3460189 | 0.001215 | NR_000011 | 2690019 | 0.003618 |
| NM_006556 | 3460242 | 0.004893 | NM_015705 | 2690576 | 0.002089 |
| XM_932114 | 3460333 | 0.004793 | NM_001014838 | 2690609 | 0.000394 |
| NM_024430 | 3460523 | 0.002452 | NM_005412 | 2710278 | 0.000973 |
| NM_003137 | 3460674 | 0.00014 | NM_003059 | 2710397 | 0.000799 |
| NM_003707 | 3520082 | 0.00205 | NM_001006109 | 2710544 | 0.001576 |
| NM_213566 | 3520192 | 0.000899 | NM_149379 | 2710711 | 0.00153 |
| NM_005476 | 3610504 | 0.000258 | NM_001018062 | 2750035 | 0.001856 |
| NM_020531 | 3610634 | 0.003802 | NM_003707 | 2750408 | 0.000173 |
| NM_002883 | 3710189 | 0.001488 | NM_015135 | 2750521 | 0.00238 |
| NM_018129 | 3780220 | 0.001767 | NM_001961 | 2750626 | 0.004774 |
| NM_001002010 | 3780689 | 0.002077 | NM_006260 | 2760064 | 0.002457 |
| NM_052889 | 3780747 | 0.003272 | NM_005449 | 2760092 | 0.000698 |
| NM_000648 | 3800270 | 0.00343 | NM_017917 | 2760110 | 0.001042 |
| XM_943902 | 3800382 | 0.001606 | NM_001414 | 2760563 | 0.002254 |
| XM_930898 | 3830390 | 0.002862 | NM_016546 | 2760593 | 0.003436 |
| NM_004092 | 3840022 | 0.000495 | XM_942424 | 2810113 | 0.003936 |
| AK025332 | 3850020 | 0.004261 | NM_017827 | 2810132 | 0.00442 |
| NM_001040167 | 3890095 | 0.004393 | XM_942926 | 2810674 | 0.001067 |
| NM_024326 | 3930687 | 0.001645 | NM_007357 | 2810767 | 0.002044 |
| XM_940524 | 3940368 | 0.004972 | NM_001530 | 2850288 | 0.00107 |
| NM_000849 | 3940386 | 0.002075 | NM_005082 | 2850576 | 0.002256 |
| BX111927 | 3940719 | 0.004709 | NM_003754 | 2900482 | 0.004472 |
| NM_012111 | 3990192 | 0.003566 | NM_001384 | 2900524 | 0.002065 |
| XM_496059 | 3990465 | 0.002277 | XM_938382 | 2940687 | 0.003298 |
| X00437 | 3990639 | 0.000336 | NM_006328 | 2970332 | 0.001256 |
| BM668555 | 4050270 | 0.001619 | XM_208281 | 2970537 | 0.003352 |
| NM_002635 | 4050398 | 0.002878 | NM_031488 | 3120301 | 0.000108 |
| NM_153329 | 4050411 | 0.001925 | NM_032290 | 3120358 | 0.002208 |
| NM_015054 | 4060056 | 0.002765 | NM_014234 | 3130019 | 0.001845 |
| NM_004811 | 4060131 | 0.001071 | NM_017905 | 3130091 | 0.000411 |
| NM_030915 | 4120086 | 0.002988 | NM_004555 | 3130291 | 0.003429 |
| NM_001779 | 4150161 | 0.001027 | NM_133445 | 3130328 | 0.00236 |
| AA868051 | 4150402 | 0.000262 | XM_001127981 | 3130392 | 0.003717 |
| NM_002756 | 4150632 | 0.001356 | NM_000159 | 3130440 | 0.001055 |
| NM_014181 | 4150768 | 0.004995 | NM_020750 | 3130711 | 0.001628 |
| NM_016091 | 4180142 | 0.00252 | NM_016230 | 3140039 | 0.000503 |
| XM_378421 | 4200148 | 0.001375 | NM_205548 | 3140088 | 0.001002 |
| NM_015721 | 4200538 | 0.001048 | NM_006767 | 3140093 | 0.000556 |
| NM_024600 | 4210647 | 0.001184 | NM_001005738 | 3140114 | 0.003326 |
| NM_001042631 | 4220138 | 0.000866 | NM_020925 | 3140142 | 0.000982 |
| NM_002496 | 4220181 | 0.002053 | NM_033111 | 3140246 | 0.000676 |
| AI863525 | 4230520 | 0.000274 | NM_004666 | 3140382 | 0.001177 |
| NM_139247 | 4230653 | 0.000973 | NM_015710 | 3170092 | 0.000608 |
| BQ894602 | 4230706 | 0.003125 | NM_016089 | 3170468 | 0.002997 |
| NM_183384 | 4280047 | 0.000834 | NM_003569 | 3190382 | 0.003983 |
| NM_020414 | 4280332 | 0.000423 | NM_001417 | 3290066 | 0.003624 |
| NM_138554 | 4390615 | 0.002746 | NM_004177 | 3290192 | 0.002921 |
| NM_015651 | 4540082 | 0.000308 | NM_014941 | 3360364 | 4.62E−05 |
| BC016972 | 4540088 | 0.002144 | NM_020808 | 3370605 | 0.001107 |
| BX102269 | 4540114 | 0.003399 | NM_005698 | 3370687 | 0.000681 |
| NM_015433 | 4540301 | 0.000651 | NM_003475 | 3390008 | 0.001688 |
| AI433683 | 4560463 | 0.000984 | BI492679 | 3390333 | 0.004921 |
| NM_015654 | 4560601 | 0.002683 | NM_170736 | 3390458 | 0.001781 |
| BU752667 | 4560703 | 0.002272 | NM_000022 | 3400328 | 0.001988 |
| NM_024046 | 4610619 | 0.004543 | NM_015002 | 3400372 | 0.003533 |
| BX096530 | 4610670 | 0.002723 | NM_000884 | 3400504 | 0.001548 |
| NM_138931 | 4640044 | 0.001309 | NM_006114 | 3400747 | 0.003116 |
| NM_025228 | 4640528 | 0.003713 | NM_207311 | 3420343 | 0.000375 |
| XR_001416 | 4640598 | 0.004431 | NM_003032 | 3420471 | 0.004724 |
| DA122577 | 4670259 | 0.001993 | NM_001042600 | 3420630 | 0.000909 |
| NM_003543 | 4730195 | 0.000341 | NM_015722 | 3420682 | 0.001732 |
| CK300859 | 4730577 | 0.000106 | NM_015288 | 3420735 | 0.000203 |
| NM_016553 | 4760543 | 2.55E−05 | XM_001126287 | 3440040 | 0.001256 |
| NM_005243 | 4780743 | 0.002978 | NM_019027 | 3440392 | 0.002462 |
| NM_030811 | 4830435 | 0.001748 | NM_012110 | 3440431 | 0.000616 |
| NM_012321 | 4830563 | 0.004211 | NM_006384 | 3440678 | 0.003917 |
| NM_006725 | 4850192 | 0.000947 | NM_139244 | 3460189 | 0.000136 |
| NM_016552 | 4850541 | 0.000257 | NM_006556 | 3460242 | 0.00407 |
| NM_015239 | 4860132 | 0.004753 | NM_003137 | 3460674 | 4.63E−05 |
| NM_032320 | 4860296 | 0.001214 | NM_003707 | 3520082 | 5.68E−05 |
| NM_024092 | 4880364 | 0.00344 | NM_213566 | 3520192 | 0.000198 |
| BX096603 | 4880373 | 0.000369 | NM_005476 | 3610504 | 0.000612 |
| NM_007171 | 4880681 | 0.003294 | NM_002972 | 3610592 | 0.003784 |
| AI625753 | 4880767 | 0.004723 | NM_020531 | 3610634 | 0.002777 |
| NM_000117 | 4890711 | 0.004476 | NM_002883 | 3710189 | 0.000834 |
| NM_014281 | 4900053 | 1.89E−05 | NM_001550 | 3780243 | 0.001235 |
| BM669760 | 4900497 | 0.001931 | NM_001002010 | 3780689 | 0.000653 |
| NM_182648 | 4920204 | 0.004559 | NM_005746 | 3800243 | 0.000849 |
| NM_018079 | 5080056 | 0.00105 | XM_932678 | 3800253 | 0.001514 |
| NM_015702 | 5090204 | 0.000414 | NM_000648 | 3800270 | 0.002434 |
| NM_003559 | 5090477 | 0.00074 | AA393557 | 3800324 | 0.004359 |
| NM_002150 | 5090554 | 0.003485 | NM_023080 | 3830278 | 0.001994 |
| NM_007355 | 5130082 | 0.002507 | XM_930898 | 3830390 | 0.00019 |
| AA431917 | 5130154 | 0.001307 | NM_004092 | 3840022 | 0.000593 |
| NM_016423 | 5130341 | 0.003578 | CB852393 | 3840307 | 0.004329 |
| NM_003853 | 5130475 | 0.001765 | NM_139353 | 3850025 | 0.002667 |
| BU587445 | 5130747 | 0.00211 | NM_003496 | 3850286 | 0.004501 |
| NM_005902 | 5130767 | 0.004347 | AA775557 | 3850427 | 0.003949 |
| CD693563 | 5260184 | 0.00302 | NM_020169 | 3850669 | 0.003662 |
| CD243631 | 5270450 | 0.004917 | NM_001040167 | 3890095 | 0.004914 |
| NM_000075 | 5270500 | 0.002368 | NM_145738 | 3890220 | 0.004146 |
| NM_032312 | 5290289 | 0.000641 | NM_024326 | 3930687 | 0.001557 |
| NM_022730 | 5310050 | 0.001909 | BF514306 | 3930730 | 0.002821 |
| NM_001033667 | 5310136 | 0.002721 | CF887308 | 3940020 | 0.001121 |
| NM_012387 | 5310653 | 0.002029 | NM_005225 | 3940338 | 0.000175 |
| NM_001007239 | 5310754 | 0.000923 | XM_940524 | 3940368 | 0.00018 |
| AA668491 | 5360400 | 0.00277 | NM_000849 | 3940386 | 0.003231 |
| NM_178232 | 5360674 | 0.004984 | BX111927 | 3940719 | 0.003191 |
| NM_015713 | 5390100 | 0.00371 | NM_012111 | 3990192 | 0.003659 |
| NM_003906 | 5390131 | 0.000496 | NM_000717 | 3990296 | 0.00346 |
| NM_006321 | 5390669 | 0.002487 | NM_080387 | 3990328 | 0.001994 |
| NM_000852 | 5420538 | 0.003886 | XM_496059 | 3990465 | 0.003563 |
| NM_020129 | 5420689 | 0.004467 | X00437 | 3990639 | 7.12E−05 |
| NM_001001998 | 5490142 | 0.003903 | NM_003642 | 4010037 | 0.00324 |
| NM_152272 | 5550746 | 0.0025 | NM_007292 | 4010048 | 0.001936 |
| AK125708 | 5560093 | 0.003459 | NM_022555 | 4010053 | 0.003358 |
| NM_004665 | 5570673 | 0.003902 | XM_935153 | 4010376 | 0.001636 |
| NM_013270 | 5690037 | 0.000251 | NM_015490 | 4010673 | 0.001481 |
| NM_032118 | 5700403 | 0.000798 | NM_030666 | 4040221 | 0.002049 |
| NM_001716 | 5720347 | 0.004342 | NM_002635 | 4050398 | 0.003256 |
| NM_173791 | 5720398 | 0.003847 | NM_153329 | 4050411 | 0.00116 |
| NM_002808 | 5720497 | 0.003313 | NM_015054 | 4060056 | 0.00105 |
| XR_000589 | 5810465 | 0.001969 | NM_004811 | 4060131 | 0.001313 |
| BQ709011 | 5820228 | 0.004664 | NM_030915 | 4120086 | 0.000447 |
| NM_017570 | 5820348 | 0.002957 | NM_022827 | 4120133 | 0.000262 |
| NM_020405 | 5820465 | 0.004304 | AI961125 | 4120300 | 0.003877 |
| BU733214 | 5860196 | 0.000367 | NM_001779 | 4150161 | 0.000305 |
| NM_145658 | 5860348 | 0.004424 | AA868051 | 4150402 | 0.000383 |
| NM_004688 | 5870673 | 0.004916 | NM_002756 | 4150632 | 0.00379 |
| NM_014141 | 5890273 | 0.003312 | AK094576 | 4150685 | 0.002914 |
| NM_001628 | 5890327 | 0.003688 | NM_014181 | 4150768 | 0.004928 |
| NM_006082 | 5900156 | 0.000222 | NM_016091 | 4180142 | 0.003057 |
| NM_005548 | 5900414 | 0.002062 | XM_378421 | 4200148 | 0.003029 |
| NM_182757 | 5910037 | 0.00416 | XM_068632 | 4200451 | 0.002981 |
| NM_178510 | 5910091 | 0.000822 | NM_015721 | 4200538 | 0.000495 |
| NM_170699 | 5960035 | 0.000233 | NM_052931 | 4210427 | 0.002323 |
| NM_139215 | 5960128 | 0.002869 | NM_024600 | 4210647 | 0.000576 |
| NM_003415 | 6020132 | 0.001268 | NM_001042631 | 4220138 | 0.000175 |
| NM_014230 | 6020402 | 0.002218 | NM_002496 | 4220181 | 0.002516 |
| NM_004833 | 6040639 | 0.001696 | NM_139247 | 4230653 | 0.001376 |
| NM_181786 | 6060133 | 0.001626 | NM_003329 | 4260048 | 0.000817 |
| NM_004252 | 6060324 | 0.004914 | NM_183384 | 4280047 | 0.00115 |
| NM_018150 | 6060379 | 0.004073 | NM_020414 | 4280332 | 4.19E−05 |
| NM_007255 | 6100220 | 0.00078 | NM_003174 | 4280373 | 0.000909 |
| NM_024839 | 6110132 | 0.003698 | NM_201429 | 4280463 | 0.002925 |
| NM_007365 | 6110133 | 0.001213 | NM_138554 | 4390615 | 0.001547 |
| XM_931928 | 6110537 | 0.001296 | NM_183236 | 4490138 | 0.004556 |
| NM_004044 | 6110768 | 0.000385 | AW083999 | 4490612 | 0.004741 |
| BF515803 | 6130747 | 0.004903 | NM_015651 | 4540082 | 0.000227 |
| NM_006503 | 6180192 | 0.002611 | NM_015433 | 4540301 | 0.001354 |
| NM_032376 | 6200746 | 0.004502 | NM_001979 | 4540424 | 0.004906 |
| NM_004227 | 6220161 | 0.004183 | NM_005139 | 4560133 | 0.002038 |
| NM_005968 | 6270021 | 0.002343 | AI433683 | 4560463 | 0.004182 |
| NM_000074 | 6270128 | 8.15E−05 | NM_015654 | 4560601 | 0.004851 |
| NM_032536 | 6270382 | 0.004882 | BU752667 | 4560703 | 0.00138 |
| NM_002964 | 6280576 | 0.001047 | NM_198955 | 4570270 | 0.003438 |
| AL157484 | 6280682 | 0.000692 | NM_198334 | 4570291 | 0.003017 |
| NM_001039508 | 6280754 | 0.000859 | NM_006122 | 4570612 | 0.004292 |
| NM_003755 | 6290431 | 0.001811 | NM_006445 | 4590082 | 0.001401 |
| XM_936128 | 6290561 | 0.001924 | XM_942378 | 4590400 | 0.001016 |
| NM_021729 | 6330634 | 0.00132 | NM_001024667 | 4590646 | 0.001785 |
| NM_005176 | 6350360 | 0.000972 | NM_024046 | 4610619 | 0.004626 |
| XM_001133111 | 6370463 | 0.000949 | NM_138931 | 4640044 | 0.001003 |
| NM_033416 | 6380598 | 0.000496 | NM_016284 | 4640064 | 0.001555 |
| NM_006519 | 6380731 | 0.002754 | NM_025228 | 4640528 | 0.002756 |
| AI184681 | 6400026 | 0.002376 | NM_003543 | 4730195 | 8.13E−05 |
| BG621614 | 6400047 | 0.004378 | CK300859 | 4730577 | 0.001164 |
| NM_006242 | 6400064 | 0.003176 | NM_001017404 | 4760364 | 0.000869 |
| NM_005360 | 6400369 | 0.003275 | BU678343 | 4760445 | 0.003878 |
| NM_001040107 | 6400563 | 0.000184 | NM_016553 | 4760543 | 9.71E−05 |
| XM_937796 | 6420079 | 0.003331 | XM_001132754 | 4760687 | 0.003729 |
| AK128384 | 6420541 | 0.003933 | NM_012413 | 4780672 | 0.000392 |
| NM_001005332 | 6480170 | 0.002105 | NM_005243 | 4780743 | 0.004712 |
| NM_025150 | 6480328 | 0.001837 | NM_030811 | 4830435 | 0.001353 |
| NM_015853 | 6480386 | 0.004998 | NM_012321 | 4830563 | 0.000506 |
| NM_033554 | 6480500 | 0.001722 | NM_006725 | 4850192 | 0.000207 |
| AI732550 | 6480554 | 0.002036 | NM_021809 | 4850438 | 0.00149 |
| NM_020679 | 6520241 | 0.001034 | NM_016552 | 4850541 | 0.000202 |
| XR_018793 | 6550142 | 0.001141 | XR_015190 | 4850577 | 0.003202 |
| NM_001040273 | 6550762 | 0.003428 | NM_015239 | 4860132 | 0.000272 |
| NM_006164 | 6580075 | 0.002164 | NM_032320 | 4860296 | 0.00046 |
| NM_024619 | 6590386 | 0.000143 | NM_024092 | 4880364 | 0.001638 |
| NM_001007224 | 6590523 | 0.002247 | BX096603 | 4880373 | 0.004389 |
| CA436726 | 6620102 | 0.001192 | DB337751 | 4880632 | 0.004101 |
| AL577216 | 6650356 | 0.002786 | NM_007171 | 4880681 | 0.00356 |
| NM_015214 | 6660020 | 0.00362 | NM_003512 | 4890192 | 0.004879 |
| NM_030911 | 6660671 | 0.00082 | NM_014281 | 4900053 | 6.86E−05 |
| NM_000632 | 6660709 | 0.003279 | XM_946033 | 4900398 | 0.003853 |
| NM_144779 | 6760487 | 0.002952 | NM_182648 | 4920204 | 0.002893 |
| NM_006825 | 6770348 | 0.002671 | NM_007047 | 4920577 | 0.000119 |
| BX110808 | 6770491 | 0.000657 | NM_006429 | 5050390 | 0.003643 |
| NR_003141 | 6840162 | 0.003603 | NM_145032 | 5050653 | 0.002836 |
| AA576740 | 6840408 | 0.003069 | NM_018079 | 5080056 | 0.002245 |
| H89368 | 6900689 | 0.003575 | NM_032501 | 5090047 | 0.00444 |
| NM_004964 | 6940242 | 0.000592 | NM_015702 | 5090204 | 0.00053 |
| M97723 | 6940246 | 0.002642 | NM_019082 | 5090315 | 0.003879 |
| NM_001033515 | 6960328 | 0.003545 | NM_003559 | 5090477 | 0.002427 |
| NM_018384 | 6960746 | 0.000337 | NM_007355 | 5130082 | 0.000507 |
| NM_004776 | 6980070 | 0.000193 | NM_001001998 | 5130142 | 0.003246 |
| BI915661 | 6980274 | 0.003684 | AA431917 | 5130154 | 0.004876 |
| NM_178839 | 6980609 | 0.000248 | BX116065 | 5130204 | 0.004257 |
| NM_138576 | 7000133 | 0.004268 | NM_003853 | 5130475 | 0.001893 |
| NM_025263 | 7000408 | 0.002112 | NM_003221 | 5130553 | 0.003758 |
| NM_017773 | 7000768 | 0.002585 | BU587445 | 5130747 | 0.002849 |
| XM_943393 | 7050196 | 0.004809 | NM_005902 | 5130767 | 0.001239 |
| NM_182476 | 7050543 | 0.001999 | CD693563 | 5260184 | 0.003778 |
| NM_078483 | 7100136 | 0.000162 | CD243631 | 5270450 | 0.003378 |
| NM_017481 | 7100392 | 0.002685 | NM_000075 | 5270500 | 0.000777 |
| NM_006429 | 7150017 | 0.000353 | NM_032312 | 5290289 | 0.000172 |
| NM_006901 | 7150634 | 0.000569 | NM_022730 | 5310050 | 0.000699 |
| NM_014976 | 7160296 | 0.00114 | NM_001033667 | 5310136 | 0.000701 |
| AI479236 | 7160470 | 0.002 | NM_148956 | 5310270 | 0.004697 |
| AW263210 | 7200477 | 0.002998 | BM967229 | 5310491 | 0.003691 |
| NM_145806 | 7210369 | 0.003405 | NM_012387 | 5310653 | 0.001724 |
| NM_015474 | 7320047 | 0.003831 | NM_001007239 | 5310754 | 0.00072 |
| NM_001008269 | 7320100 | 0.000502 | NM_005933 | 5340162 | 0.004187 |
| BX097495 | 7320376 | 0.004734 | NM_019008 | 5360068 | 0.004801 |
| NM_004813 | 7320551 | 0.003202 | AW137762 | 5360605 | 0.002613 |
| NM_003757 | 7320576 | 0.003074 | NM_178232 | 5360674 | 0.002348 |
| NM_002566 | 7330487 | 0.000769 | NM_015713 | 5390100 | 0.001513 |
| NM_007167 | 7380274 | 0.001267 | NM_003906 | 5390131 | 0.000534 |
| NM_016237 | 7380288 | 0.000729 | NM_006321 | 5390669 | 0.000373 |
| NM_001923 | 7400121 | 0.003534 | NM_000852 | 5420538 | 0.003424 |
| NM_000488 | 7400240 | 0.002702 | NM_001001998 | 5490142 | 0.001318 |
| NM_001037161 | 7510224 | 0.001608 | BX113537 | 5550270 | 0.000602 |
| NM_001003722 | 7510369 | 0.001719 | NM_152272 | 5550746 | 0.00039 |
| NM_001152 | 7550537 | 0.000167 | NM_177405 | 5560280 | 0.00499 |
| NM_004183 | 7570450 | 0.002439 | NM_006867 | 5570193 | 0.004084 |
| BX108926 | 7610148 | 0.003989 | XM_942424 | 5570196 | 0.004706 |
| NM_032717 | 7610546 | 0.003466 | NM_004665 | 5570673 | 0.004804 |
| NM_024422 | 7650025 | 0.001467 | NM_015374 | 5570750 | 0.002013 |
| NM_001313 | 7650458 | 0.004086 | XM_001127763 | 5670133 | 0.004026 |
| NM_024681 | 7650605 | 0.004236 | NM_145641 | 5670274 | 0.002947 |
| | | | NM_005500 | 5690008 | 0.002642 |
| | | | NM_013270 | 5690037 | 1.52E−05 |
| | | | NM_002923 | 5690500 | 0.001875 |
| | | | NM_015295 | 5700136 | 0.003953 |
| | | | NM_032118 | 5700403 | 0.000289 |
| | | | NM_152781 | 5720241 | 0.002673 |
| | | | NM_001716 | 5720347 | 0.004003 |
| | | | DB303282 | 5720373 | 0.004423 |
| | | | NM_173791 | 5720398 | 0.000249 |
| | | | NM_004585 | 5720458 | 0.00115 |
| | | | NM_002808 | 5720497 | 0.003488 |
| | | | NM_006496 | 5810598 | 0.002808 |
| | | | AK124463 | 5820193 | 0.003209 |
| | | | NM_017570 | 5820348 | 0.002081 |
| | | | NM_003517 | 5860075 | 0.003754 |
| | | | BU733214 | 5860196 | 0.000365 |
| | | | NM_021052 | 5860400 | 0.00219 |
| | | | BM974838 | 5870300 | 0.001445 |
| | | | NM_004688 | 5870673 | 0.002374 |
| | | | NM_014141 | 5890273 | 0.003248 |
| | | | NM_001628 | 5890327 | 0.001535 |
| | | | NM_139346 | 5890333 | 0.002256 |
| | | | BF515836 | 5890367 | 0.00211 |
| | | | NM_012257 | 5890494 | 0.001865 |
| | | | NM_006082 | 5900156 | 0.000375 |
| | | | NM_005548 | 5900414 | 0.001908 |
| | | | NM_031992 | 5910088 | 0.004775 |
| | | | NM_178510 | 5910091 | 0.000846 |
| | | | XM_001131964 | 5910343 | 0.003185 |
| | | | NM_170699 | 5960035 | 0.000747 |
| | | | BC042086 | 5960041 | 0.002812 |
| | | | NM_198155 | 5960301 | 0.003719 |
| | | | BX106383 | 5960605 | 0.00307 |
| | | | NM_014230 | 6020402 | 0.000851 |
| | | | NM_024923 | 6020500 | 0.000974 |
| | | | NM_032839 | 6020575 | 0.002031 |
| | | | NM_024586 | 6020685 | 0.003957 |
| | | | NM_015568 | 6040196 | 0.004917 |
| | | | NM_032853 | 6040259 | 0.004217 |
| | | | NM_181786 | 6060133 | 0.004363 |
| | | | NM_014840 | 6060201 | 0.004107 |
| | | | NM_004252 | 6060324 | 0.004124 |
| | | | NM_007255 | 6100220 | 0.000447 |
| | | | NM_005384 | 6100228 | 0.003035 |
| | | | NM_005502 | 6110088 | 0.004671 |
| | | | NM_024839 | 6110132 | 0.00438 |
| | | | NM_144666 | 6110142 | 0.003237 |
| | | | NM_173855 | 6110228 | 0.001661 |
| | | | NM_003645 | 6110328 | 0.001512 |
| | | | XM_931928 | 6110537 | 0.0003 |
| | | | NM_001025077 | 6110672 | 0.004167 |
| | | | NM_004044 | 6110768 | 4.01E−05 |
| | | | NM_016509 | 6130377 | 0.0043 |
| | | | NM_006503 | 6180192 | 0.004565 |
| | | | NM_015645 | 6200537 | 0.001303 |
| | | | NM_032376 | 6200746 | 0.002231 |
| | | | NM_152371 | 6250338 | 0.003725 |
| | | | NM_146388 | 6250367 | 0.004386 |
| | | | BX509313 | 6250446 | 0.003448 |
| | | | NM_005968 | 6270021 | 0.001087 |
| | | | NM_000074 | 6270128 | 0.000192 |
| | | | XM_373742 | 6270215 | 0.001519 |
| | | | NM_015044 | 6270364 | 0.001601 |
| | | | XM_926048 | 6270630 | 0.003286 |
| | | | NM_145043 | 6280168 | 0.000975 |
| | | | NM_002964 | 6280576 | 0.00325 |
| | | | NM_001039508 | 6280754 | 0.000582 |
| | | | NM_182776 | 6290239 | 0.001296 |
| | | | NM_003755 | 6290431 | 0.000524 |
| | | | XM_936128 | 6290561 | 0.00025 |
| | | | NM_021729 | 6330634 | 0.001548 |
| | | | NM_005176 | 6350360 | 0.002665 |
| | | | NM_002704 | 6350364 | 0.000588 |
| | | | XM_001133111 | 6370463 | 0.003426 |
| | | | NM_033301 | 6380148 | 0.001271 |
| | | | NM_001032363 | 6380358 | 0.004497 |
| | | | NM_033416 | 6380598 | 0.000273 |
| | | | NM_006242 | 6400064 | 0.002832 |
| | | | XM_937796 | 6420079 | 0.003831 |
| | | | NM_004627 | 6420138 | 0.004707 |
| | | | XM_941861 | 6420364 | 0.002695 |
| | | | AK128384 | 6420541 | 0.001627 |
| | | | NM_001005332 | 6480170 | 0.00083 |
| | | | NM_025150 | 6480328 | 0.002432 |
| | | | NM_033554 | 6480500 | 0.000219 |
| | | | AW779539 | 6510452 | 0.004666 |
| | | | XM_942392 | 6520333 | 0.002215 |
| | | | XR_018793 | 6550142 | 0.000948 |
| | | | NM_001040273 | 6550762 | 0.000958 |
| | | | NM_006164 | 6580075 | 0.001079 |
| | | | NM_024619 | 6590386 | 5.24E−05 |
| | | | NM_001007224 | 6590523 | 0.000585 |
| | | | NM_001098522 | 6620674 | 0.00328 |
| | | | NM_016057 | 6650403 | 0.003328 |
| | | | CB066794 | 6650482 | 0.003597 |
| | | | NM_176880 | 6650541 | 0.001086 |
| | | | CA424950 | 6650576 | 0.002265 |
| | | | BG217842 | 6660056 | 0.002557 |
| | | | NM_170738 | 6660471 | 0.002505 |
| | | | NM_144779 | 6760487 | 0.003962 |
| | | | NM_002513 | 6770142 | 0.002174 |
| | | | NM_006825 | 6770348 | 0.002983 |
| | | | AI150595 | 6840131 | 0.004481 |
| | | | NR_003141 | 6840162 | 0.003273 |
| | | | AA576740 | 6840408 | 0.001434 |
| | | | NM_015540 | 6860243 | 0.001783 |
| | | | NM_014465 | 6900154 | 0.004753 |
| | | | NM_004964 | 6940242 | 0.000666 |
| | | | M97723 | 6940246 | 0.001381 |
| | | | NM_020739 | 6960707 | 0.003629 |
| | | | NM_018384 | 6960746 | 5.22E−05 |
| | | | NM_004776 | 6980070 | 0.000267 |
| | | | BI915661 | 6980274 | 0.001186 |
| | | | BG429923 | 6980386 | 0.004335 |
| | | | NM_178839 | 6980609 | 0.000513 |
| | | | NM_138576 | 7000133 | 0.00074 |
| | | | NM_018380 | 7000224 | 0.004277 |
| | | | NM_025263 | 7000408 | 0.000816 |
| | | | NM_017773 | 7000768 | 0.000646 |
| | | | NM_006759 | 7040088 | 0.004327 |
| | | | NM_153746 | 7040609 | 0.004133 |
| | | | NM_182476 | 7050543 | 0.000185 |
| | | | NM_078483 | 7100136 | 0.000534 |
| | | | NM_017481 | 7100392 | 0.001067 |
| | | | NM_004623 | 7100504 | 0.003389 |
| | | | NM_006429 | 7150017 | 0.000297 |
| | | | NM_014165 | 7150601 | 0.003091 |
| | | | NM_006901 | 7150634 | 0.000149 |
| | | | NM_199184 | 7160164 | 0.000695 |
| | | | NM_014976 | 7160296 | 0.000428 |
| | | | NM_022897 | 7160554 | 0.001213 |
| | | | NM_023079 | 7160767 | 0.00388 |
| | | | NM_016623 | 7200309 | 0.001774 |
| | | | NM_014290 | 7200682 | 0.002665 |
| | | | NM_020706 | 7320273 | 0.003345 |
| | | | NM_003757 | 7320576 | 0.000763 |
| | | | NM_002566 | 7330487 | 0.000974 |
| | | | NM_174856 | 7380170 | 0.002502 |
| | | | NM_007167 | 7380274 | 0.002578 |
| | | | NM_016237 | 7380288 | 0.000209 |
| | | | NM_021805 | 7380328 | 0.001162 |
| | | | NM_005787 | 7380347 | 0.00378 |
| | | | NM_024850 | 7380440 | 0.000889 |
| | | | NM_199176 | 7380736 | 0.002902 |
| | | | NM_001923 | 7400121 | 0.002348 |
| | | | NM_000488 | 7400240 | 0.002066 |
| | | | NM_001037161 | 7510224 | 0.002565 |
| | | | NM_001152 | 7550537 | 9.37E−05 |
| | | | NM_006014 | 7560241 | 0.00418 |
| | | | NM_006537 | 7570112 | 0.00303 |
| | | | NM_001023587 | 7610097 | 0.004367 |
| | | | NM_032717 | 7610546 | 0.001865 |
| | | | NM_024422 | 7650025 | 0.00091 |
| | | | AW378958 | 7650195 | 0.004699 |
| | | | NM_001313 | 7650458 | 0.004475 |
| | | | NM_024681 | 7650605 | 0.00042 |

1. A method for the detection of non-small cell lung cancer (NSCLC) in a human individual based on RNA obtained from a blood sample obtained from the individual, comprising:
determining the abundance of at least 5 RNAs in the sample that are chosen from the RNAs listed in Table 2, and
concluding based on the measured abundance whether the patient has NSCLC.

2. The method of claim 1, wherein the abundance of at least 7, or of at least 11 RNAs that are chosen from the RNAs listed in Table 2 is determined.

3. The method of claim 1, wherein
concluding comprises classifying the sample as being from a healthy individual or from an individual having NSCLC based on the specific difference of the abundance of the at least 5 RNAs in healthy individuals versus the abundance of the at least 5 RNAs in individuals with NSCLC.

4. The method of claim 3, wherein the classifying is achieved by applying a Support Vector Machines (SVM), a random forest method, or a K-nearest neighbor method.

5. The method of claim 1, which comprises determining the abundance of the RNAs specified in FIG. 2B.

6. The method of claim 1, wherein the abundance of the RNAs in the sample are increased or decreased as shown in Table 2.

7. The method of claim 6, wherein an increase of the abundance provides for a change of >1.1, >1.2, or >1.3, and a decrease of the expression provides for a change <0.9, <0.8, or <0.7 relative to the respective expression in a healthy individual.

8. The method of claim 1, wherein the abundance is determined with an RNA hybridization assay, preferably with a solid phase microarray, a real-time polymerase chain reaction, or sequencing.

9. The method of claim 1, wherein the abundance is determined through a hybridization with probes for determining the abundance of the at least 5 RNAs of Table 2.

10. The method of claim 9, wherein said probes comprise 15 to 150, preferably 30 to 70 consecutive nucleotides with a reverse complementary sequence to the at least 5 RNAs whose abundance is to be determined.

11. A microarray for the detection of NSCLC comprising probes for detecting at least 5, or at least 7, or at least 11 RNAs that are chosen from the RNAs listed in Table 2.

12. Use of a microarray of claim 11 for the detection of non-small cell lung cancer (NSCLC) in a human individual based on RNA obtained from a blood sample obtained from the individual, preferably determining the abundance of at least 5 RNAs in the sample that are chosen from the RNAs listed in Table 2.

13. A kit for the detection of NSCLC, comprising means for determining the abundance of at least 5 RNAs in the sample that are chosen from the RNAs listed in Table 2.

14. The kit of claim 13, which comprises
probes comprising 15 to 150, preferably 30 to 70 consecutive nucleotides with a reverse complementary sequence to the at least 5 RNAs whose abundance is to be determined, or
a microarray comprising probes with a reverse complementary sequence to the at least 5 RNAs whose abundance is to be determined.

15. The kit of claim 13, which further comprises a mixture of at least 5 of the RNAs of table 2 in a given amount for use as a standard.

The application's sequence listing, which the Patent Office published only in electronic form, follows.

SEQUENCE LISTING (484 sequences)

SEQ ID NO: 1 - DNA, 768 bp, Homo sapiens
atgatcctaaacaaagctctgctgctgggggccctcgctctgaccaccgtgatgagcccctgtggaggtgaagacattgtggctgaccacgttgcctcttgtggtgtaaacttgtaccagttttacggtccctctggccagtacacccatgaatttgatggagatgagcagttctacgtggacctggagaggaaggagactgcctggcggtggcctgagttcagcaaatttggaggttttgacccgcagggtgcactgagaaacatggctgtggcaaaacacaacttgaacatcatgattaaacgctacaactctaccgctgctaccaatgaggttcctgaggtcacagtgttttccaagtctcccgtgacactgggtcagcccaacaccctcatttgtcttgtggacaacatctttcctcctgtggtcaacatcacatggctgagcaatgggcagtcagtcacagaaggtgtttctgagaccagcttcctctccaagagtgatcattccttcttcaagatcagttacctcaccttcctcccttctgctgatgagatttatgactgcaaggtggagcactggggcctggaccagcctcttctgaaacactgggagcctgagattccagcccctatgtcagagctcacagagactgtggtctgtgccctggggttgtctgtgggcctcatgggcattgtggtgggcactgtcttcatcatccaaggcctgcgttcagttggtgcttccagacaccaagggccattgtga

SEQ ID NO: 2 - DNA, 438 bp, Homo sapiens
atggctacctgggccctcctgctccttgcagccatgctcctgggcaacccaggtctggtcttctctcgtctgagccctgagtactacgacctggcaagagcccacctgcgtgatgaggagaaatcctgcccgtgcctggcccaggagggcccccagggtgacctgttgaccaaaacacaggagctgggccgtgactacaggacctgtctgacgatagtccaaaaactgaagaagatggtggataagcccacccagagaagtgtttccaatgctgcgacccgggtgtgtaggacggggaggtcacgatggcgcgacgtctgcagaaatttcatgaggaggtatcagtctagagttacccagggcctcgtggccggagaaactgcccagcagatctgtgaggacctcaggttgtgtataccttctacaggtcccctctga

SEQ ID NO: 3 - DNA, 1151 bp, Homo sapiens
ctggtctagaatattccacatctgctctcactctgccatggactcctggaccttctgctgtgtgtccctttgcatcctggtagcgaagcatacagatgctggagttatccagtcaccccgccatgaggtgacagagatgggacaagaagtgactctgagatgtaaaccaatttcaggccacaactcccttttctggtacagacagaccatgatgcggggactggagttgctcatttactttaacaacaacgttccgatagatgattcagggatgcccgaggatcgattctcagctaagatgcctaatgcatcattctccactctgaagatccagccctcagaacccagggactcagctgtgtacttctgtgccagcagtttctcgacctgttcggctaactatggctacaccttcggttcggggaccaggttaaccgttgtagaggacctgaacaaggtgttcccacccgaggtcgctgtgtttgagccatcagaagcagagatctcccacacccaaaaggccacactggtgtgcctggccacaggcttcttccccgaccacgtggagctgagctggtgggtgaatgggaaggaggtgcacagtggggtcagcacagacccgcagcccctcaaggagcagcccgccctcaatgactccagatactgcctgagcagccgcctgagggtctcggccaccttctggcagaacccccgcaaccacttccgctgtcaagtccagttctacgggctctcggagaatgacgagtggacccaggatagggccaaacccgtcacccagatcgtcagcgccgaggcctggggtagagcagactgtggctttacctcggtgtcctaccagcaaggggtcctgtctgccaccatcctctatgagatcctgctagggaaggccaccctgtatgctgtgctggtcagcgcccttgtgttgatggccatggtcaagagaaaggatttctgaaggcagccctggaagtggagttaggagcttctaacccgtcatggttcaatacacattcttcttttgccagcgcttctgaagagctgctctcacctctctgcatcccaatagatatccccctatgtgcatgcacacctgcacactcacggctgaaatctccctaacccagggggac

SEQ ID NO: 4 - DNA, 1284 bp, Homo sapiens
atacgcagtattttggcccaggcacccggctgacagtgctcgaggacctgaaaaacgtgttcccacccgaggtcgctgtgtttgagccatcagaagcagagatctcccacacccaaaaggccacactggtatgcctggccacaggcttctaccccgaccacgtggagctgagctggtgggtgaatgggaaggaggtgcacagtggggtcagcacagacccgcagcccctcaaggagcagcccgccctcaatgactccagatactgcctgagcagccgcctgagggtctcggccaccttctggcagaacccccgcaaccacttccgctgtcaagtccagttctacgggctctcggagaatgacgagtggacccaggatagggccaaacccgtcacccagatcgtcagcgccgaggcctggggtagagcaggtgagtggggcctggggagatgcctggaggagattaggtgagaccagctaccagggaaaatggaaagatccaggtagcggacaagactagatccagaagaaagccagagtggacaaggtgggatgatcaaggttcacagggtcagcaaagcacggtgtgcacttcccccaccaagaagcatagaggctgaatggagcacctcaagctcattcttccttcagatcctgacaccttagagctaagctttcaagtctccctgaggaccagccatacagctcagcatctgagtggtgtgcatcccattctcttctggggtcctggtttcctaagatcatagtgaccacttcgctggcactggagcagcatgagggagacagaaccagggctatcaaaggaggctgactttgtactatctgatatgcatgtgtttgtggcctgtgagtctgtgatgtaaggctcaatgtccttacaaagcagcattctctcatccatttttcttcccctgttttctttcagactgtggcttcacctccgagtcttaccagcaaggggtcctgtctgccaccatcctctatgagatcttgctagggaaggccaccttgtatgccgtgctggtcagtgccctcgtgctgatggccatggtcaagagaaaggattccagaggctagctccaaaaccatcccaggtcattcttcatcctcacccaggattctcctgtacctgctcccaatctgtgttcctaaaagtgattctcactctgcttctcatctcctacttacatgaatacttctctcttttttctgtttccctgaagattgagctcccaacccccaagtacgaaataggctaaaccaa

SEQ ID NO: 5 - DNA, 2007 bp, Homo sapiens
atgtggctcttcttcgggatcactggattgctgacggcagccctctcaggtcatccatctccagccccacctgaccagctcaacaccagcagtgcagagagtgagctctgggagccaggggagcggcttccggtccgtctgacaaacgggagcagcagctgcagcgggacggtggaggtgcggctcgaggcgtcctgggagcccgcgtgcggggcgctctgggacagccgcgccgccgaggccgtgtgccgagcactgggctgcggcggggcggaggccgcctctcagctcgccccgccgacccctgagctgccgcccccgcctgcagccgggaacaccagcgtagcagctaatgccactctggccggggcgcccgccctcctgtgcagcggcgccgagtggcggctctgcgaggtggtggagcacgcgtgccgcagcgacgggaggcgggcccgtgtcacctgtgcagagaaccgcgcgctgcgcctggtggacggtggcggcgcctgcgccggccgcgtggagatgctggagcatggcgagtggggatcagtgtgcgatgacacttgggacctggaggacgcccacgtggtgtgcaggcaactgggctgcggctgggcagtccaggccctgcccggcttgcacttcacgcccggccgcgggcctatccaccgggaccaggtgaactgctcgggggccgaagcttacctgtgggactgcccggggctgccaggacagcactactgcggccacaaagaggacgcgggcgcggtgtgctcagagcaccagtcctggcgcctgacagggggcgctgaccgctgcgaggggcaggtggaggtacacttccgaggggtctggaacacagtgtgtgacagtgagtggtacccatcggaggccaaggtgctctgccagtccttgggctgtggaactgcggttgagaggcccaaggggctgccccactccttgtccggcaggatgtactactcatgcaatggggaggagctcaccctctccaactgctcctggcggttcaacaactccaacctctgcagccagtcgctggcagccagggtcctctgctcagcttcccggagtttgcacaatctgtccactcccgaagtccctgcaagtgttcagacagtcactatagaatcttctgtgacagtgaaaatagagaacaaggaatctcgggagctaatgctcctcatcccctccatcgttctgggaattctcctccttggctccctcatcttcatagccttcatcctcttgagaattaaaggaaaatatgccctccccgtaatggtgaaccaccagcacctacccaccaccatcccggcagggagcaatagctatcaaccggtccccatcaccatccccaaagaagttttcatgctgcccatccaggtccaggccccgccccctgaggactcagactctggctcggactcagactatgagcactatgacttcagcgcccagcctcctgtggccctgaccaccttctacaattcccagcggcatcgggtcacagatgaggaggtccagcaaagcaggttccagatgccacccttggaggaaggacttgaagagttgcatgcctcccacatcccaactgccaaccctggacactgcattacagacccgccatccctgggccctcagtatcacccgaggagcaacagtgagtcgagcacctcttcaggggaggattactgcaatagtcccaaaagcaagctgcctccatggaacccccaggtgttttcttcagagaggagttccttcctggagcagcccccaaacttggagctggccggcacccagccagccttttcagcagggcccccggctgatgacagctccagcacctcatccggggagtggtaccagaacttccagccaccaccccagcccccttcggaggagcagtttggctgtccagggtcccccagccctcagcctgactccaccgacaacgatgactacgatgacatcagcgcagcctag

SEQ ID NO: 6 - DNA, 783 bp, Homo sapiens
atgcgccctgaagacagaatgttccatatcagagctgtgatcttgagagccctctccttggctttcctgctgagtctccgaggagctggggccatcaaggcggaccatgtgtcaacttatgccgcgtttgtacagacgcatagaccaacaggggagtttatgtttgaatttgatgaagatgagatgttctatgtggatctggacaagaaggagaccgtctggcatctggaggagtttggccaagccttttcctttgaggctcagggcgggctggctaacattgctatattgaacaacaacttgaataccttgatccagcgttccaaccacactcaggccaccaacgatccccctgaggtgaccgtgtttcccaaggagcctgtggagctgggccagcccaacaccctcatctgccacattgacaagttcttcccaccagtgctcaacgtcacgtggctgtgcaacggggagctggtcactgagggtgtcgctgagagcctcttcctgcccagaacagattacagcttccacaagttccattacctgacctttgtgccctcagcagaggacttctatgactgcagggtggagcactggggcttggaccagccgctcctcaagcactgggaggcccaagagccaatccagatgcctgagacaacggagactgtgctctgtgccctgggcctggtgctgggcctagtcggcatcatcgtgggcaccgtcctcatcataaagtctctgcgttctggccatgacccccgggcccaggggaccctgtga

SEQ ID NO: 7 - DNA, 1701 bp, Homo sapiens
atggaggtgccccagccggagcccgcgccaggctcggctctcagtccagcaggcgtgtgcggtggcgcccagcgtccgggccacctcccgggcctcctgctgggatctcatggcctcctggggtccccggtgcgggcggccgcttcctcgccggtcaccaccctcacccagaccatgcacgacctcgccgggctcggcagccgcagccgcctgacgcacctatccctgtctcgacgggcatccgaatcctccctgtcgtctgaatcctccgaatcttctgatgcaggtctctgcatggattcccccagccctatggacccccacatggcggagcagacgtttgaacaggccatccaggcagccagccggatcattcgaaacgagcagtttgccatcagacgcttccagtctatgccggtgaggctgctgggccacagccccgtgcttcggaacatcaccaactcccaggcgcccgacggccggaggaagagcgaggcgggcagtggagctgccagcagctctggggaagacaaggagaatgatggatttgtcttcaagatgccatggaagcccacacatcccagctccacccatgctctggcagagtgggccagccgcagggaagcctttgcccagagacccagctcggcccccgacctgatgtgtctcagtcctgaccggaagatggaagtggaggagctcagccccctggccctaggtcgcttctctctgacccctgcagagggggatactgaggaagatgatggatttgtggacatcctagagagtgacttaaaggatgatgatgcagttcccccaggcatggagagtctcattagtgccccactggtcaagaccttggaaaaggaagaggaaaaggacctcgtcatgtacagcaagtgccagcggctcttccgctctccgtccatgccctgcagcgtgatccggcccatcctcaagaggctggagcggccccaggacagggacacgcccgtgcagaataagcggaggcggagcgtgacccctcctgaggagcagcaggaggctgaggaacctaaagcccgcgtcctccgctcaaaatcactgtgtcacgatgagatcgagaacctcctggacagtgaccaccgagagctgattggagattactctaaggccttcctcctacagacagtagacggaaagcaccaagacctcaagtacatctcaccagaaacgatggtggccctattgacgggcaagttcagcaacatcgtggataagtttgtgattgtagactgcagatacccctatgaatatgaaggcgggcacatcaagactgcggtgaacttgcccctggaacgcgacgccgagagcttcctactgaagagccccatcgcgccctgtagcctggacaagagagtcatcctcattttccactgtgaattctcatctgagcgtgggccccgcatgtgccgtttcatcagggaacgagaccgtgctgtcaacgactaccccagcctctactaccctgagatgtatatcctgaaaggcggctacaaggagttcttccctcagcacccgaacttctgtgaaccccaggactaccggcccatgaaccacgaggccttcaaggatgagctaaagaccttccgcctcaagactcgcagctgggctggggagcggagccggcgggagctctgtagccggctgcaggaccagtga

SEQ ID NO: 8 - DNA, 1400 bp, Homo sapiens
gcagagcctgggtaggagagcctggccccgctgtccccactgggtggagacaccatgcacttggtccttgtgctcttcagccaggacaccagacatggtccaaaccgctgcagggctggctgcagcaactccctgacactcaggaaggcccaggctgggcaggcaatacctgctcccaacagccatgcatgccggctgccgctccaggactcccctgtccccaggaccaagatgacgcccaacagcactggcgaggtgcccagccccattcccaagggggctttggggctctccctggccctggcaagcctcatcatcaccgcgaacctgctcctagccctgggcatcgcctgggaccgccgcctgcgcagcccacctgctggctgcttcttcctgagcctactgctggctgggctgctcacgggtctggcattgcccacattgccagggctgtggaaccagagtcgccggggttactggtcctgcctcctcgtctacttggctcccaacttctccttcctctccctgcttgccaacctcttgctggtgcacggggagcgctacatggcagtcctgaggccactccagccccctgggagcattcggctggccctgctcctcacctgggctggtcccctgctctttgccagtctgcccgctctggggtggaaccactggacccctggtgccaactgcagctcccaggctatcttcccagccccctacctgtacctcgaagtctatgggctcctgctgcccgccgtgggtgctgctgccttcctctctgtccgcgtgctggccactgcccaccgccagctgcaggacatctgccggctggagcgggcagtgtgccgcgatgagccctccgccctggcccgggcccttacctggaggcaggcaagggcacaggctggagccatgctgctcttcgggctgtgctgggggccctacgtggccacactgctcctctcagtcctggcctatgagcagcgcccgccactggggcctgggacactgttgtccctcctctccctaggaagtgccagtgcagcggcagtgcccgtagccatggggctgggcgatcagcgctacacagccccctggagggcagccgcccaaaggtgcctgcaggggctgtggggaagagcctcccgggacagtcccggccccagcattgcctaccacccaagcagccaaagcagtgtcgacctggacttgaactaaaggaagggcctctgctgactcctaccagagcatccgtccagctcagccatccagcctgtctctactgggccccacttctctggatcagagaccctgcctctgtttgaccccgcactgactgaataaagctcctctggccgttaaaaaaaaaaaaaaaaaaaaaaaaaaaaaaaaaa

SEQ ID NO: 9 - DNA, 2466 bp, Homo sapiens
atggacgtcgtggaccctgacattttcaatagagacccccgggaccactatgacctgctacagcggctgggtggcggcacgtatggggaagtctttaaggctcgagacaaggtgtcaggggacctggtggcactgaagatggtgaagatggagcctgatgatgatgtctccacccttcagaaggaaatcctcatattgaaaacttgccggcacgccaacatcgtggcctaccatgggagttatctctggttgcagaaactctggatctgcatggaattctgtggggctggttctctccaggacatctaccaagtgacaggctccctgtcagagctccagattagctatgtctgccgggaagtgctccagggactggcctatttgcactcacagaagaagatacacagggacatcaagggagctaacatcctcatcaatgatgctggggaggtcagattggctgactttggcatctcggcccagattggggctacactggccagacgcctctctttcattgggacaccctactggatggctccggaagtggcagctgtggccctgaagggaggatacaatgagctgtgtgacatctggtccctgggcatcacggccatcgaactggccgagctacagccaccgctctttgatgtgcaccctctcagagttctcttcctcatgaccaagagtggctaccagcctccccgactgaaggaaaaaggcaaatggtcggctgccttccacaacttcatcaaagtcactctgactaagagtcccaagaaacgacccagcgccaccaagatgctcagtcatcaactggtatcccagcctgggctgaatcgaggcctgatcctggatcttcttgacaaactgaagaatcccgggaaaggaccctccattggggacattgaggatgaggagcccgagctaccccctgctatccctcggcggatcagatccacccaccgctccagctctctggggatcccagatgcagactgctgtcggcggcacatggagttcaggaagctccgaggaatggagaccagacccccagccaacaccgctcgcctacagcctcctcgagacctcaggagcagcagccccaggaagcaactgtcagagtcgtctgacgatgactatgacgacgtggacatccccacccctgcagaggacacacctcctccacttccccccaagcccaagttccgttctccatcagacgagggtcctgggagcatgggggatgatgggcagctgagcccgggggtgctggtccggtgtgccagtgggcccccaccaaacagcccccgtcctgggcctcccccatccaccagcagcccccacctcaccgcccattcagaaccctcactctggaacccaccctcccgggagcttgacaagcccccacttctgccccccaagaaggaaaagatgaagagaaagggatgtgcccttctcgtaaagttgttcaatggctgccccctccggatccacagcacggccgcctggacacatccctccaccaaggaccagcacctgctcctgggggcagaggaaggcatcttcatcctgaaccggaatgaccaggaggccacgctggaaatgctctttcctagccggactacgtgggtgtactccatcaacaacgttctcatgtctctctcaggaaagaccccccacctgtattctcatagcatccttggcctgctggaacggaaagagaccagagcaggaaaccccatcgctcacattagcccccaccgcctactggcaaggaagaacatggtttccaccaagatccaggacaccaaaggctgccgggcgtgctgtgtggcggagggtgcgagctctgggggcccgttcctgtgcggtgcattggagacgtccgttgtcctgcttcagtggtaccagcccatgaacaaattcctgcttgtccggcaggtgctgttcccactgccgacgcctctgtccgtgttcgcgctgctgaccgggccaggctctgagctgcccgctgtgtgcatcggcgtgagccccgggcggccggggaagtcggtgctcttccacacggtgcgctttggcgcgctctcttgctggctgggcgagatgagcaccgagcacaggggacccgtgcaggtgacccaggtagaggaagatatggtgatggtgttgatggatggctctgtgaagctggtgaccccggaggggtccccagtccggggacttcgcacacctgagatccccatgaccgaagcggtggaggccgtggctatggttggaggtcagcttcaggccttctggaagcatggagtgcaggtgtgggctctaggctcggatcagctgctacaggagctgagagaccctaccctcactttccgtctgcttggctcccccaggcctgtagtggtggagacacgcccagtggatgatcctactgctcccagcaacctctacatccaggaatga

SEQ ID NO: 10 - DNA, 4190 bp, Homo sapiens
caacctccagccagtccctgggtcgggcggatcctcccagaggtggcacaatggagcgatctccaggagagggccccagccccagccccatggaccagccctctgctccctccgaccccactgaccagccccccgctgctcacgcaaagccagacccaggttctgggggccaacctgctggccctggcgcggcgggtgaggccctggcggtgctgacttcattcgggaggcggttgctggtgctgatacctgtgtatttggccggggcagtgggactcagcgtgggtttcgtgctcttcggcctcgccctctacctgggctggcgccgggtccgcgacgagaaagaacggagccttcgagcagcgaggcagctactggacgacgaggagcagctcactgcgaaaactctctatatgagtcatcgagagctacctgcctgggtcagcttcccagacgtggaaaaggctgaatggctcaataagattgtggcccaggtctggcccttcctgggccagtatatggagaagcttctggctgaaactgtggctccggctgttaggggatctaacccccatctgcaaacatttacatttacacgagtggaactgggtgaaaagccattgcgcatcattggagtcaaggttcacccaggtcagagaaaagagcagatcctgctggacttgaacatcagctatgtaggtgatgtgcagattgatgtggaagtgaagaaatatttttgcaaagcaggagtcaagggcatgcagctacatggcgttttgcgggtgatactggagccactcattggggaccttcccttcgtgggggctgtgtcaatgttcttcatccgacgcccgaccctagacatcaactggacagggatgaccaacctgctggatatcccaggacttagctcactctctgacaccatgatcatggactccattgctgccttcctcgtgttgcccaaccgattactggtgccccttgtgcctgaccttcaagatgtggctcagttgcgttcccctctgcccaggggcattattcgaattcacctgctggctgctcgagggctgagttccaaggacaaatatgtgaagggcctgattgagggcaagtcagacccatatgcacttgtgcgtttgggtacccagacattctgcagtcgtgtcattgatgaagaactcaacccacagtggggagagacttatgaggtgatggtacacgaggtcccagggcaggagattgaagtggaggtgttcgacaaggatccagataaagatgactttctgggcagaatgaagctggatgtagggaaggtgttacaggctagcgttctggatgattggttccctctacaaggtgggcaaggccaagttcacttgaggctagaatggctgtcacttttgtcagatgcagagaaactggagcaggttctacagtggaattggggagtctcctctcgaccagatcccccgtcagctgccatcttagttgtctacctggatcgggcccaggatcttcctctgaagaaggggaacaaggaacccaaccctatggtacaactgtcaattcaggatgtgactcaggagagcaaggctgtctacagtaccaactgcccagtgtgggaggaagcgttccggttcttcctacaagaccctcaaagccaggagctcgatgtgcaagtgaaggatgattccagggccctgactttaggagcactgacgctgcctctggcccgcctgctgactgccccagaactcatcctggaccagtggttccagctcagcagctctggtccaaactccagactctatatgaaactagtcatgaggatcctgtacttggattcatcagaaatatgcttccccacggtgcctggttgtcctggtgcttgggacgtggacagtgagaatccccagagaggcagcagtgtggatgccccacctcgaccctgtcacacgactcctgatagccagtttgggactgagcatgtgcttcggatccatgtattagaggcccaggacctgattgccaaagaccgtttcttggggggactggtgaagggcaagtcagacccctatgtcaaactaaagttggcaggacgaagcttccggagccatgttgttcgggaagatctcaatccccgctggaatgaggtttttgaggtgatcgtcacatcagttccaggccaagagctagaggttgaagtctttgacaaggacttggacaaggatgattttctgggcaggtgtaaagtgcgtctcaccacagtcttaaacagtggcttccttgatgagtggctgaccctggaggatgtcccatctggccgcctgcacttgcgcctggagcgtctcaccccccgtcccactgctgctgagttagaggaggtgctgcaggtgaatagtttgatccagactcagaagagtgcggagctggctgcggccctgctatccatctatatggagcgggcagaggacctcccgctgcgaaaaggcaccaagcacctcagcccttatgctactctcactgtgggagatagttctcataaaaccaagactatttcgcaaacttcagcccctgtctgggatgagagtgcctcctttctcatcaggaaaccacacactgagagcctagagttgcaggttcggggtgagggcactggcgtgctgggctcattatccctgcccctctcagagctcctcgtggctgaccagctctgcttggaccgctggtttacactcagcagtggtcaggggcaggtgctactgagagcacagctagggatcctggtgtcccagcactcgggagtggaagctcatagccacagctacagccacagctcctcatcgctgagtgaagaaccagagctctcggggggaccccctcacatcacctcctcagccccagagctccggcagcgcctaacacatgttgacagtccccttgaggctccagccgggcctctgggccaggtgaaactgactctgtggtactacagtgaagaacgaaagctggtcagcattgttcatggttgccggtcccttcgacagaatggacgtgatcctcctgatccctatgtgtcactgttgctactgccagacaagaaccgaggcaccaagaggaggacctcacagaagaagaggaccctgagtcctgaatttaatgaacggtttgagtgggaactccccctggatgaggcccagagacgaaagctggatgtctctgtcaagtctaattcctccttcatgtcaagagagcgtgagctgctggggaaggtgcagctggacctagctgagacagacctttcccagggtgtagcccggtggtatgacctgatggacaacaaggacaagggcagctcctaggagctggcgagtcccagcctgactgctctgtcttcctgccttcgtctcgctccatcaccgcctcaatgtgatgagcctaaagctagggtccaagggcagagcctgtgcccttcagccctttcacctaacaggcccatattcgggcctttgcctgaccaaagagaagaaccgtatgttccctttactgcacggcctttatccttctgggcccctggggcggggacctgagctggctgtttcctgctttgcctgcacattgttctcccttcctcccaactcctcagggccttctgtatctgtgcctggccagtggcagcactagcagtggtattagcttatgccaaatacagctttggaaggatctttttttctttaactagatggtcaccttcttccctaccacacatgggtgggaaggtggacaggctaacctctccagctgtgagcctcttagactactgcatgtagcaaatgttcagcagctcaggcccccatgtccagttctgtccccactgtcctcaaccctgtcctgaaaattctactgctttgatggctggggccagtctcttgtcactttggaaactgaggacgcgtggattctactcaagcctccaagtagtggcatatcagtcttggagctcctagctggtgatacggagagggctttggaggacttgggacagcagggccaatttttttgcccaagtgcctaggctgctaactcactgactagaacttaatctggtactttacagttttgcaccaactctgccaagccactggatcttacattaaacatcatactcaaaaaaaaaaaaaaaaaaa

SEQ ID NO: 11 - DNA, 2157 bp, Homo sapiens
atgttaatgaccttggaaatgactgagctcacggaccctcatcacaccatgggagactacaaagtggcccaccctcaggaccctcaccacccatcagagaagcctgtcattcactgccataaatgtggggagccttgcaagggtgaagtgcttcgggtccagaccaaacatttccacatcaagtgtttcacctgcaaagtgtgtggctgtgacctggcacaagggggcttcttcataaagaacggagagtatctctgcaccctggactaccagcggatgtacgggacacgctgccatggctgtggggagttcgtggagggcgaagtggtgactgctctgggcaagacctaccatcccaattgctttgcttgtactatctgcaagcgcccgtttccacccggagaccgagtcacattcaatgggagagactgcctttgtcaactctgtgcacagccgatgtcgtccagtccgaaagaaaccaccttctccagcaattgtgccggctgcggaagagatatcaagaatgggcaggcgctgctggcgctggataagcagtggcacttggggtgctttaaatgcaagtcctgcgggaaggtcctcaccggggagtacatcagcaaggatggtgctccgtactgtgaaaaggactaccagggactctttggggtgaaatgtgaggcgtgtcaccagtttatcacagggaaagtcctggaggcaggtgacaaacattaccaccccagctgtgcacgatgcagcagatgcaaccagatgttcacagaaggagaggaaatgtatcttcaaggctccaccgtttggcatcccgactgtaagcaatctacgaagaccgaggaaaagctgcggcctaccaggacatcctcggaaagtatttattctaggccaggctccagtattcctggctcaccaggtcatactatctatgcaaaagtagacaatgagatcctggattacaaggatttagcagccattccgaaggtcaaggcaatttatgacattgaacgtccagatcttattacctatgagcctttctacacttcgggctatgatgacaaacaggagagacagagccttggagagtctccgaggactttgtctcctactccatcagcagaagggtaccaggatgttcgggatcggatgatccatcggtccacgagccagggctccatcaactcccctgtgtacagccgccacagctacactccaaccacgtcccgctctccccagcatttccacagacctggcaatgagccgtccagcggccggaactcccctctcccttaccggccagacagccgccctctaactccaacttacgctcaggcccctaaacatttccatgttccagatcaaggaatcaacatttaccgaaagccacccatctacaaacagcatgctgccttggcagcccagagcaagtcctcagaagatatcatcaagttttccaagttcccagcagcccaggcaccagaccccagcgagacaccaaagattgagacggaccactggcctggtcccccctcatttgctgtcgtaggacctgacatgaaacgcagatctagtggcagagaggaagatgatgaggaacttctgagacgtcggcagcttcaagaagagcaattaatgaagcttaactcaggcctgggacagttgatcttgaaagaagagatggagaaagagagccgggaaaggtcatctctgttagccagtcgctacgattctcccatcaactcagcttcacatattccatcatctaaaactgcatctctccctggctatggaagaaatgggcttcaccggcctgtttctaccgacttcgctcagtataacagctatggggatgtcagcgggggagtgcgagattaccagacactcccagatggccacatgcctgcaatgagaatggaccgaggagtgtctatgcccaacatgttggaaccaaagatatttccatatgaaatgctcatggtgaccaacagagggcgaaacaaaatcctcagagaggtggacagaaccaggctggagcgccacttagcccctgaagtgtttcgggaaatctttggaatgtccatacaggagtttgacaggttacctctttggagacgcaacgacatgaagaaaaaagcaaaactcttctaa

SEQ ID NO: 12 - DNA, 1173 bp, Homo sapiens
atggacttctggctttggccactttacttcctgccagtatcgggggccctgaggatcctcccagaagtaaaggtagagggggagctgggcggatcagttaccatcaagtgcccacttcctgaaatgcatgtgaggatatatctgtgccgggagatggctggatctggaacatgtggtaccgtggtatccaccaccaacttcatcaaggcagaatacaagggccgagttactctgaagcaatacccacgcaagaatctgttcctagtggaggtaacacagctgacagaaagtgacagcggagtctatgcctgcggagcgggcatgaacacagaccggggaaagacccagaaagtcaccctgaatgtccacagtgaatacgagccatcatgggaagagcagccaatgcctgagactccaaaatggtttcatctgccctatttgttccagatgcctgcatatgccagttcttccaaattcgtaaccagagttaccacaccagctcaaaggggcaaggtccctccagttcaccactcctcccccaccacccaaatcacccaccgccctcgagtgtccagagcatcttcagtagcaggtgacaagccccgaaccttcctgccatccactacagcctcaaaaatctcagctctggaggggctgctcaagccccagacgcccagctacaaccaccacaccaggctgcacaggcagagagcactggactatggctcacagtctgggagggaaggccaaggatttcacatcctgatcccgaccatcctgggccttttcctgctggcacttctggggctggtggtgaaaagggccgttgaaaggaggaaagccctctccaggcgggcccgccgactggccgtgaggatgcgcgccctggagagctcccagaggccccgcgggtcgccgcgaccgcgctcccaaaacaacatctacagcgcctgcccgcggcgcgctcgtggagcggacgctgcaggcacaggggaggcccccgttcccggccccggagcgccgttgccccccgccccgctgcaggtgtctgaatctccctggctccatgccccatctctgaagaccagctgtgaatacgtgagcctctaccaccagcctgccgccatgatggaggacagtgattcagatgactacatcaatgttcctgcctga

SEQ ID NO: 13 - DNA, 1656 bp, Homo sapiens
atggcggcccctgctctgtcctggcgtctgcccctcctcatcctcctcctgcccctggctacctcttgggcatctgcagcggtgaatggcacttcccagttcacatgcttctacaactcgagagccaacatctcctgtgtctggagccaagatggggctctgcaggacacttcctgccaagtccatgcctggccggacagacggcggtggaaccaaacctgtgagctgctccccgtgagtcaagcatcctgggcctgcaacctgatcctcggagccccagattctcagaaactgaccacagttgacatcgtcaccctgagggtgctgtgccgtgagggggtgcgatggagggtgatggccatccaggacttcaagccctttgagaaccttcgcctgatggcccccatctccctccaagttgtccacgtggagacccacagatgcaacataagctgggaaatctcccaagcctcccactactttgaaagacacctggagttcgaggcccggacgctgtccccaggccacacctgggaggaggcccccctgctgactctcaagcagaagcaggaatggatctgcctggagacgctcaccccagacacccagtatgagtttcaggtgcgggtcaagcctctgcaaggcgagttcacgacctggagcccctggagccagcccctggccttcaggacaaagcctgcagcccttgggaaggacaccattccgtggctcggccacctcctcgtgggcctcagcggggcttttggcttcatcatcttagtgtacttgctgatcaactgcaggaacaccgggccatggctgaagaaggtcctgaagtgtaacaccccagacccctcgaagttcttttcccagctgagctcagagcatggaggagacgtccagaagtggctctcttcgcccttcccctcatcgtccttcagccctggcggcctggcacctgagatctcgccactagaagtgctggagagggacaaggtgacgcagctgctcctgcagcaggacaaggtgcctgagcccgcatccttaagcagcaaccactcgctgaccagctgcttcaccaaccagggttacttcttcttccacctcccggatgccttggagatagaggcctgccaggtgtactttacttacgacccctactcagaggaagaccctgatgagggtgtggccggggcacccacagggtcttccccccaacccctgcagcctctgtcaggggaggacgacgcctactgcaccttcccctccagggatgacctgctgctcttctcccccagtctcctcggtggccccagccccccaagcactgcccctgggggcagtggggccggtgaagagaggatgcccccttctttgcaagaaagagtccccagagactgggacccccagcccctggggcctcccaccccaggagtcccagacctggtggattttcagccaccccctgagctggtgctgcgagaggctggggaggaggtccctgacgctggccccagggagggagtcagtttcccctggtccaggcctcctgggcagggggagttcagggcccttaatgctcgcctgcccctgaacactgatgcctacttgtccctccaagaactccagggtcaggacccaactcacttggtgtag

SEQ ID NO: 14 - DNA, 924 bp, Homo sapiens
atgggaggattccagaggggcaaatatggaactatggctgaaggtagatcagaagataacttgtctgcaacaccaccggcattgaggattatcctagtgggcaaaacaggctgcgggaaaagtgccacagggaacagcatccttggccagcccgtgtttgagtccaagctgagggcccagtcagtgaccaggacgtgccaggtgaaaacaggaacatggaacgggaggaaagtcctggtggttgacacgccctccatctttgagtcacaggccgatacccaagagctgtacaagaacatcggggactgctacctgctctctgccccggggccccacgtcctgcttctggtgatccagctggggcgtttcactgctcaggacacagtggccatcaggaaggtgaaagaggtctttgggacaggggccatgagacatgtggtcatcctcttcacccacaaagaggacttagggggccaggccctggatgactatgtagcaaacacggacaactgcagcctgaaagacctggtgcgggagtgtgagagaaggtactgtgccttcaacaactggggctctgtggaggagcagaggcagcagcaggcagagctcctggctgtgattgagaggctggggagggagcgagagggctccttccacagcaatgacctcttcttggatgcccagctgctccaaagaactggagctggggcctgccaggaagactacaggcagtaccaggccaaagtggaatggcaggtggagaagcacaagcaagagctgagggagaacgagagtaactgggcatacaaggcgctcctcagagtcaaacacttgatgcttttgcattatgagatttttgtttttctattgttgtgcagcatactttttttcattatttttctgttcatctttcattacatttaa

SEQ ID NO: 15 - DNA, 765 bp, Homo sapiens
atggccataagtggagtccctgtgctaggatttttcatcatagctgtgctgatgagcgctcaggaatcatgggctatcaaagaagaacatgtgatcatccaggccgagttctatctgaatcctgaccaatcaggcgagtttatgtttgactttgatggtgatgagattttccatgtggatatggcaaagaaggagacggtctggcggcttgaagaatttggacgatttgccagctttgaggctcaaggtgcattggccaacatagctgtggacaaagccaacctggaaatcatgacaaagcgctccaactatactccgatcaccaatgtacctccagaggtaactgtgctcacaaacagccctgtggaactgagagagcccaacgtcctcatctgtttcatagacaagttcaccccaccagtggtcaatgtcacgtggcttcgaaatggaaaacctgtcaccacaggagtgtcagagacagtcttcctgcccagggaagaccaccttttccgcaagttccactatctccccttcctgccctcaactgaggacgtttacgactgcagggtggagcactggggcttggatgagcctcttctcaagcactgggagtttgatgctccaagccctctcccagagactacagagaacgtggtgtgtgccctgggcctgactgtgggtctggtgggcatcattattgggaccatcttcatcatcaagggattgcgcaaaagcaatgcagcagaacgcagggggcctctgtaa

SEQ ID NO: 16 - DNA, 828 bp, Homo sapiens
atgtcctctttcggttacaggaccctgactgtggccctcttcaccctgatctgctgtccaggatcggatgagaaggtattcgaggtacacgtgaggccaaagaagctggcggttgagcccaaagggtccctcgaggtcaactgcagcaccacctgtaaccagcctgaagtgggtggtctggagacctctctagataagattctgctggacgaacaggctcagtggaaacattacttggtctcaaacatctcccatgacacggtcctccaatgccacttcacctgctccgggaagcaggagtcaatgaattccaacgtcagcgtgtaccagcctccaaggcaggtcatcctgacactgcaacccactttggtggctgtgggcaagtccttcaccattgagtgcagggtgcccaccgtggagcccctggacagcctcaccctcttcctgttccgtggcaatgagactctgcactatgagaccttcgggaaggcagcccctgctccgcaggaggccacagccacattcaacagcacggctgacagagaggatggccaccgcaacttctcctgcctggctgtgctggacttgatgtctcgcggtggcaacatctttcacaaacactcagccccgaagatgttggagatctatgagcctgtgtcggacagccagatggtcatcatagtcacggtggtgtcggtgttgctgtccctgttcgtgacatctgtcctgctctgcttcatcttcggccagcacttgcgccagcagcggatgggcacctacggggtgcgagcggcttggaggaggctgccccaggccttccggccatag

SEQ ID NO: 17 - DNA, 1158 bp, Homo sapiens
gcctgctgctctggcccctggtcctgtcctcttctccagcatggtgtgtctgaagctccctggaggctccagcttggcagcgttgacagtgacactgatggtgctgagctcccgactggctttcgctggggacacccgaccacgtttcttggagctgcgtaagtctgagtgtcatttcttcaatgggacggagcgggtgcggtacctggacagatacttccataaccaggaggagttcctgcgcttcgacagcgacgtgggggagtaccgggcggtgacggagctggggcggcctgtcgccgagtcctggaacagccagaaggacctcctggagcagaagcggggccgggtggacaattactgcagacacaactacggggttggtgagagcttcacagtgcagcggcgagtccatcctcaggtgactgtgtatcctgcaaagacccagcccctgcagcaccacaacctcctggtctgctctgtgagtggtttctatccaggcagcattgaagtcaggtggttccggaacggccaggaagagaaggctggggtggtgtccacgggcctgatccagaatggagactggaccttccagaccctggtgatgctagaaacagttcctcggagtggagaggtttacacttgccaagtggagcacccaagcgtaacgagcgctctcacagtggaatggagagcacggtctgaatctgcacagagcaagatgctgagtggagtcgggggctttgtgctgggcctgctcttccttggggccgggctgttcatctacttcaggaatcagaaaggacactctggacttcagccaacaggattcctgagctgaagtgcagatgacaatttaaggaagaatcttctgccccagctttgcaggatgaaaagctttcccgcctggctgttattcttccacgagagagggctttctcaggacctagttgctactggttcagcaactgcagaaaatgtcctcccttgtggcttcctcagttcctgcccttggcctgaagtcccagcattgatggcagcgcctcatcttcaacttttgtgctcccctttgcctaaaccctatggcctcctgtgcatctgtactcaccctgtaccacaaacacattacattattaaatgtttctcaaagatggagtt

SEQ ID NO: 18 - DNA, 537 bp, Homo sapiens
atgtcgccctctggtcgcctgtgtcttctcaccatcgttggcctgattctccccaccagaggacagacgttgaaagataccacgtccagttcttcagcagactcaactatcatggacattcaggtcccgacacgagccccagatgcagtctacacagaactccagcccacctctccaaccccaacctggcctgctgatgaaacaccacaaccccagacccagacccagcaactggaaggaacggatgggcctctagtgacagatccagagacacacaagagcaccaaagcagctcatcccactgatgacaccacgacgctctctgagagaccatccccaagcacagacgtccagacagacccccagaccctcaagccatctggttttcatgaggatgaccccttcttctatgatgaacacaccctccggaaacgggggctgttggtcgcagctgtgctgttcatcacaggcatcatcatcctcaccagtggcaagtgcaggcagctgtcccggttatgccggaatcgttgcaggtga

SEQ ID NO: 19 - DNA, 1536 bp, Homo sapiens
atgttggtggatggcccatctgagcggccagccctgtgcttcttgctgttggctgtggcaatgtctttcttcggctcagctctatccatagatgaaacacgggcgcatctgttgttgaaagaaaagatgatgcggctgggggggcggctggtgctgaacaccaaggaggagctggccaatgagaggctcatgacgctcaaaatcgctgagatgaaggaggccatgaggaccctgatattcccacccagcatgcactttttccaggccaagcatctcattgagagaagtcaagtgtttaatattctaaggatgatgccaaaaggggctgccttgcacctccatgacattggcatcgtgactatggactggctggtgaggaatgtcacctacaggcctcactgccacatctgtttcaccccaagggggatcatgcagttcagatttgctcacccaactccccgtccatcagaaaaatgttccaagtggattctgctggaggattatcggaagcgggtgcagaacgtcactgagtttgatgacagcttgctgaggaatttcactctggtgacccagcacccggaggtgatttacacaaaccaaaatgttgtctggtcgaaatttgaaaccatcttcttcaccatctctggtctcatccattacgcaccagtgttcagagactatgtcttccggagcatgcaggagttctacgaggacaacgtgctctacatggagatcagagccaggctgctgccggtgtatgagctcagtggagagcaccatgacgaagagtggtcagtgaagacttaccaggaagtagctcagaagtttgtggaaactcaccctgagtttattggaatcaaaatcatttattcggatcacagatccaaagatgtggctgtcatcgcagaatccatccgaatggccatggggctccgaatcaagttccccacggtggtggcagggtttgacctggtggggcatgaggacactggccactccttgcatgactacaaggaagctctgatgatccccgccaaggatggcgttaagctgccttacttcttccacgccggagaaacagactggcagggtacttccatagacaggaacattctggatgctctgatgctgaacactaccagaatcggccatggatttgctttgagcaaacaccccgcagtcaggacttactcctggaaaaaggacatccccatagaagtctgtcccatctctaaccaggtgctgaaactggtgtctgacttgaggaaccaccctgtagccactctgatggccactgggcaccccatggtgatcagctctgatgacccagctatgtttggtgccaaaggcttgtcctatgatttctatgaggtcttcatgggcattggggggatgaaggctgacctgaggaccctcaaacagctggccatgaactctatcaagtacagtaccctgttggagagtgagaaaaatactttcatggaaatctggaagaagagatgggataagttcatagcagatgtggctacaaagtga

SEQ ID NO: 20 - DNA, 1853 bp, Homo sapiens
atcgcgcgagacagcggaaggagcaagagtgggaggcgcgcgcggaggccgcgacggacgcaagatggcgacggcgaccatagctctccaggtcaatggccagcaaggaggggggtccgagccggcggcggcggcggcagtggtggcagcgggagacaaatggaaacctccacagggcacagactccatcaagatggagaacgggcagagcacagccgccaagctggggctgcctcccctgacgcccgagcagcaggaggcccttcagaaggccaagaagtacgccatggagcagagcatcaagagtgtgctggtgaagcagaccatcgcgcaccagcagcagcagctcaccaacctgcagatggcggctcagcggcagcgggcgctggccatcatgtgccgcgtctacgtgggctctatctactatgagctgggggaggacaccatccgccaggcctttgccccctttggccccatcaagagcatcgacatgtcctgggactccgtcaccatgaagcacaagggctttgccttcgtggagtatgaggtccccgaagctgcacagctggccttggagcagatgaactcggtgatgctggggggcaggaacatcaaggtgggcagacccagcaacatagggcaggcccagcccatcatagaccagttggctgaggaggcacgggccttcaaccgcatctacgtggcctctgtgcaccaggacctctcagacgatgacatcaagagcgtgtttgaggcctttggcaagatcaagtcctgcacactggcccgggaccccacaactggcaagcacaagggctacggcttcattgagtacgagaaggcccagtcgtcccaagatgctgtgtcttccatgaacctctttgacctgggtggccagtacttgcgggtgggcaaggctgtcacaccgcccatgcccctactcacaccagccacgcctggaggcctcccacctgccgctgctgtggcagctgctgcagccactgccaagatcacagctcaggaagcagtggccggagcagcggtgctgggtaccctgggcacacctggactggtgtccccagcactgaccctggcccagcccctgggcactttgccccaggctgtcatggctgcccaggcacctggagtcatcacaggtgtgaccccagcccgtcctcctatcccggtcaccatcccctcggtgggagtggtgaaccccatcctggccagccctccaacgctgggtctcctggagcccaagaaggagaaggaagaagaggagctgtttcccgagtcagagcggccagagatgctgagcgagcaggagcacatgagcatctcgggcagtagcgcccgacacatggtgatgcagaagctgctccgcaagcaggagtctacagtgatggttctgcgcaacatggtggaccccaaggacatcgatgatgacctggaaggggaggtgacagaggagtgtggcaagttcggggccgtgaaccgcgtcatcatctaccaagagaaacaaggcgaggaggaggatgcagaaatcattgtcaagatctttgtggagttttccatagcctctgagactcataaggccatccaggccctcaatggccgctggtttgctggccgcaaggtggtggctgaagtgtacgaccaggagcgttttgataacagtgacctctctgcgtgacagtggtccctctccccggacttgcacttgttccttgtttcctctgggttttatagtgatacagtggtgtccccggggccaggcgcgctctgcccagcccagcctacagtgcggataaaggtgcggatgctgctggccctgaaaaaaaaaaaaaaaaaaa

SEQ ID NO: 21 - DNA, 3435 bp, Homo sapiens
gtactacttctgcgcctgcgcgaccgtgattccccgctcgcgactccccaccccccagggctccctaaagagggccacgagctgcgaaagggcgggaaaggcagttggagaagaggtaagcggttactcactccatggctgcagcaaggagaggcggcggcggcctcggctgaagaaagaaggtgggagcggagagcgcaggcgtgccgaggtggatgtccgtcttttctctgttgcagaaacccaccttgtcccatccacatcaggacatcccagctggagttcaaccttcatcccttctgtggcagttaggagactgaatcaaggtccagagaaggtggaggaatcctgatactgagcgaaatcttcccaaggctgcagacaccgacggatttgctttgggagccagagtagctgccgccaccagagtccggagccatgagcgggtttaattttggaggcactggggcccctacaggcgggttcacgtttggcactgcaaagacggcaacaaccacacctgctacagggttttctttctccacctctggcactggagggtttaattttggggctcccttccaaccagccacaagtaccccttccaccggcctgttctcacttgccacccagactccggccacacagacgacaggcttcacttttggaacagcgactcttgcttcggggggaactggattttctttggggatcggtgcttcaaagctcaacttgagcaacacagctgccaccccagccatggcaaaccccagcggctttgggctgggcagcagcaacctcactaatgccatatcgagcaccgtcacctccagccagggcacagcacccaccggctttgtgtttggcccctccaccacctctgtggctccagctaccacatctggaggcttctcattcactggtggaagcacggcccaaccctccggtttcaacattggctcagcagggaattcagcccagcccacggcacctgccacgttgcccttcactccggccacgccagcagccaccacagcaggtgccacacagccagctgctcccacacccacagccaccatcaccagcactgggcccagcctctttgcgtcaatagcaactgctccaacctcatctgccaccactggactctccctctgtacccctgtgaccacagcgggcgcccccactgctgggacacagggcttcagcttaaaggcacctggagcagcttccggcacctccacaacaacatccaccgctgccaccgccaccgccaccaccaccagcagcagcagcaccaccggctttgccttgaatttaaaaccactggcgccagccgggatccccagcaatacagcagctgccgtgaccgctccacctggccctggcgcagctgcaggggcggctgccagctccgccatgacctacgcgcagctggagagcctgatcaacaaatggagcctggagctagaggaccaggagcggcacttcctccagcaggccacccaggtcaacgcctgggaccgcacgctgatcgagaatggagaaaagatcaccagcctgcaccgcgaggtggagaaggtgaagctggaccagaagaggctggaccaggagctcgacttcatcctgtcccagcagaaggagctggaagacctgctgagcccactggaggagttggtcaaggagcagagcgggaccatctacctgcagcacgcggatgaggagcgtgagaaaacctacaagctggctgagaacatcgatgcacagctcaagcgcatggcccaggatctcaaggacatcatcgagcacctgaacacgtccggggcccccgccgacaccagtgacccactgcagcagatctgcaagatcctcaatgcgcacatggactcactgcagtggatcgaccagaactcggccctgctgcagaggaaggtggaggaggtgaccaaggtgtgcgagggccggcgcaaggagcaggagcgcagcttccggatcacctttgactgagcgacagcagccctggggcccgcaggtccctagggagttcatgaggggaatgcgccctgttgtctgtagtttggggttgtggcaagatacttgtttgtttgtttctttctttcacatgactgcccttgacatgatcgctgtgtgctttgcgtttttccatttaggagggtattctgggccttctgcccaggcagcagcctcatgggtgtggcttctgtggctttcatttgagtatctttggccccttttcacctactgcgaccacccacctcatcctggctcagcctggtgatggagaagtgctgatggtcttggtcccagccagggtcgtgggggcagccactctctccaaagcatagtcataggtgtcatgaaaaaataccaaatgtaagagaacctccaagtcagggcgcagtggctcacccctgtaatctcagcactttgggtggccaaggcgggcagatgacttgaggtcaggagttcgagaccagcctggccaacatggtgaaaccccgtctctactaaaaatacaaaaattagtcaggtgtggtggacgcctgtgatctcaatctcagctactcgggaggctgaggcaggagaatcacttgaacccaggaggtgttgcagtgaaccaagatcacaccactgcactccagcctaggcaacagagactctgtctcaaaaaaaaaaaaaaaaaaaaagaaactcccaggagacagcagcctagttttcgagtgtgagcttgtgcttgtgaaagctaaccatgctaaccaccaaggcaaagcagcacagtgtgaatagaacagagcgggatcaagaatttcacagaagacaggtcagctgaggggcctgcacacacagggtgttgaggaaccacagatgggcgccgagaggcctgccttttgcctggcccaggctcacccccaccttgggcctcacctcctccaggaagccttcccagctacccgaagctcaggtggccttcttgcaggtccccgtagcaccctgagcctgtaccttgggtggcacttgttatgctatcctgtgctagccgtttgtgcctcgtctcgctgttagattgtgagttcccatgggcagagacccactgtcgttccccgtgtgtccccagcccggtccctgtcacatttgttaaatgaaagaacaatgaagcccagtgtaacgtcagtccacagaaatagccacagcttccagtggtggccgtagacttggctcggaacttagtggcaccagagtaactctagtcagttacagtaaaatccactgtgtgtggaaggcagaagctagcggttgtatcccaagcatcttttgtatttgtctttatactttgctgaattctctgaaatacctattactgtatgttgcttttctaaataaatgtattgtgaaaccaaaaaaaaaaaaaaaaaa

SEQ ID NO: 22 - DNA, 7008 bp, Homo sapiens
atggccggagtgtttccttatcgagggccgggtaacccggtgcctggccctctagccccgctaccggactacatgtcggaggagaagctgcaggagaaagctcgaaaatggcagcaattgcaggccaagcgctatgcagaaaagcggaagtttgggtttgtggatgcccagaaggaagacatgcccccagaacatgtcaggaagatcattcgagaccatggagacatgaccaacaggaagttccgccatgacaaaagggtttacttgggtgccctaaagtacatgccccacgcagtcctcaaactcctggagaacatgcctatgccttgggagcagattcgggatgtgcctgtgctgtaccacatcactggagccatttccttcgtcaatgagattccctgggtcattgaacctgtctacatctcccagtgggggtcaatgtggattatgatgcgccgagaaaaaagagataggaggcatttcaagaggatgcgttttcccccttttgatgatgaggagccgcccttggactatgctgacaacatcctagatgttgagccactggaggccattcagctagagctggaccctgaggaggacgcccctgtgttggactggttctatgaccaccagccgttgagggacagcaggaagtatgtaaatggctccacttaccagcgctggcagttcacactacctatgatgtcgactctctaccgcctggctaatcagctcctgacagacttggtggatgacaactacttctacctgtttgatttgaaggccttctttacgtccaaggcactcaatatggccattcctggaggccccaaatttgaacctcttgttcgagacatcaacctacaggatgaagactggaatgaattcaatgatattaacaagattatcatccggcagcctatccgcactgagtacaagattgcttttccttacttgtacaacaatcttccacaccatgtccacctcacctggtaccatactcccaatgttgtattcatcaaaactgaggatcctgacttgccagctttctactttgaccctttgatcaacccaatctcccataggcactcagtcaagagccaggaaccattgccggatgatgatgaggaatttgagctcccggagtttgtggagcccttcctgaaggacacacccctctatacagacaatacagccaatggcattgccctgctctgggccccgcggcccttcaacctacgctctggtcgcacccgtcgggccctggacataccccttgtcaagaactggtatcgggagcattgtcctgccgggcagcctgtgaaagtgagggtctcctaccagaagctgcttaagtactatgtgctgaatgccctgaagcatcggccccctaaggctcaaaagaagaggtatttgttccgctccttcaaagccaccaaattctttcagtccacaaagctggactgggtggaggttgggctccaggtttgccgccagggctacaacatgctcaaccttctcattcaccgcaaaaacctcaactacctgcacctggactacaacttcaacctcaagcctgtgaaaacgctcaccaccaaggaaagaaagaaatctcgttttgggaatgctttccacctgtgtcgggaagttctgcgtttgactaagctggtggtggatagtcacgtgcagtatcggctgggcaatgtggatgccttccagctggcagatggattgcagtatatatttgcccatgttgggcagttgacgggcatgtatcgatacaaatacaagctgatgcgacagattcgcatgtgcaaggacctgaagcatctcatctattatcgtttcaacacgggccctgtagggaagggtcctggctgtggcttctgggctgccggttggcgagtctggctctttttcatgcgtggcattacccctttattagagcgatggcttggcaacctcctggcccggcagtttgaaggtcgacactcaaagggggtggcaaagacagtaacaaagcagcgagtggagtcacattttgaccttgagctgcgggcagctgtgatgcatgatattctggacatgatgcctgaggggatcaagcagaacaaggcccggacaatcctgcagcacctcagtgaagcctggcgctgctggaaagccaacattccctggaaggtccctgggctgccgacgcccatagagaatatgatccttcgatacgtgaaggccaaggctgactggtggaccaacactgcccactacaaccgagaacggatccgccgaggggccactgtggacaagactgtttgtaaaaagaatctgggccgcctcacccggctctatctgaaggcagaacaggagcggcagcacaactacctgaaggacgggccttacatcacagcggaggaagcagtggcagtatataccaccacagtgcattggttggaaagccgcaggttttcacccatcccattccccccactctcctataagcatgacaccaagttgctcatcttggcattggagcggctcaaggaagcttatagtgtgaagtctcggttgaaccagtctcagagggaggagctaggtctgatcgagcaggcctacgataacccccacgaggcgctgtcccgcatcaagcgtcacctcctcacacagagagccttcaaagaggtgggcattgagttcatggatctgtatagccacctcgttccagtatatgatgttgagcccctggagaagataactgatgcttacctggaccagtacctgtggtatgaagccgacaagcgccgcctgttcccaccctggattaagcctgcagacacagaaccacctccgctgcttgtttacaagtggtgtcaaggcatcaataacctgcaggacgtgtgggagacgagtgaaggcgagtgcaatgtcatgctggaatcccgctttgagaagatgtatgagaagatcgacttgactctgctcaacaggctgctgcgcctcatcgtggaccacaacatagccgactacatgacagccaagaacaacgtcgtcatcaactataaggacatgaaccatacgaattcatatgggatcatcagaggcctgcagtttgcctcattcatcgtgcagtattatggcctggtgatggatttgcttgtattgggattgcaccgggccagtgagatggctgggccccctcagatgccaaatgactttctcagtttccaggacatagccactgaggctgcccaccccatccgtctcttctgcagatacattgatcgcatccatatttttttcaggttcacagcagatgaggctcgggacctgattcaacgttacctgacagagcaccctgaccccaataatgaaaacatcgttggctataataacaagaagtgctggccccgagatgcccgcatgcgcctcatgaaacatgatgttaacttaggccgggcggtattctgggacatcaagaaccgcttgccacggtcagtgactacagttcagtgggagaacagcttcgtgtctgtgtacagtaaggacaaccccaacctgctgttcaacatgtgtggcttcgagtgccgcatcctgcctaagtgccgcaccagctatgaggagttcacccacaaggacggggtctggaacctgcagaatgaggttactaaggagcgcacagctcagtgtttcctgcgtgtggacgatgagtcaatgcagcgcttccacaaccgcgtgcgtcagattctcatggcctctgggtccaccaccttcaccaagattgtgaataagtggaatacagctctcattggccttatgacatactttcgggaggctgtggtgaacacccaagagctcttggacttactggtgaagtgtgagaacaaaatccagacacgtatcaagattggactcaactccaagatgccaagtcggttccccccggttgtgttctacacccctaaggagttgggtggactcggcatgctctcaatgggccatgtgctcatcccccaatccgacctcaggtggtccaaacagacagatgtaggtatcacacactttcgttcaggaatgagccatgaagaagaccagctcattcccaacttgtaccgctacatacagccatgggagagcgagttcattgattctcagcgggtctgggctgagtacgcactcaagaggcaagaggccattgctcagaacagacgcctgactttagaagacctagaagattcatgggatcgtggcattcctcgaatcaataccctcttccagaaggaccggcacacactggcttatgataagggctggcgtgtcagaactgactttaagcagtatcaggttttgaagcagaatccgttctggtggacacaccagcggcatgatgggaagctctggaacctgaacaactaccgtacagacatgatccaggccctgggcggtgtggaaggcattctggaacacacactctttaagggcacttacttccctacctgggaggggcttttctgggagaaggccagtggctttgaggaatctatgaagtggaagaagctaactaatgctcagcgatcaggactgaaccagattcccaatcgtagattcaccctctggtggtccccgaccattaatcgagccaatgtatatgtaggctttcaggtgcagctagacctgacgggtatcttcatgcacggcaagatccccacgctgaagatctctctcatccagatcttccgagctcacttgtggcagaagatccatgagagcattgttatggacttatgtcaggtgtttgaccaggaacttgatgcactggaaattgagacagtacaaaaggagacaatccatccccgaaagtcatataagatgaactcttcctgtgcagatatcctgctctttgcctcctataagtggaatgtctcccggccctcattgctggctgactccaaggatgtgatggacagcaccaccacccagaaatactggattgacatccagttgcgctggggggactatgattcccacgacattgagcgctacgcccgggccaagttcctggactacaccaccgacaacatgagtatctacccttcgcccacaggtgtactcatcgccattgacctggcctataacttgcacagtgcctatggaaactggttcccaggcagcaagcctctcatacaacaggccatggccaagatcatgaaggcaaaccctgccctgtatgtgttacgtgaacggatccgcaaggggctacagctctattcatctgaacccactgagccttatttgtcttctcagaactatggtgagctcttctccaaccagattatctggtttgtggatgacaccaacgtctacagagtgactattcacaagacctttgaagggaacttgacaaccaagcccatcaacggagccatcttcatcttcaacccacgcacagggcagctgttcctcaagataatccacacgtccgtgtgggcgggacagaagcgtttggggcagttggctaagtggaagacagctgaggaggtggccgccctgatccgatctctgcctgtggaggagcagcccaagcagatcattgtcaccaggaagggcatgctggacccactggaggtgcacttactggacttccccaatattgtcatcaaaggatcggagctccaactccctttccaggcgtgtctcaaggtggaaaaattcggggatctcatccttaaagccactgagccccagatggttctcttcaacctctatgacgactggctcaagactatttcatcttacacggccttctcccgtctcatcctgattctgcgtgccctacatgtgaacaacgatcgggcaaaagtgatcctgaagccagacaagactactattacagaaccacaccacatctggcccactctgactgacgaagaatggatcaaggtcgaggtgcagctcaaggatctgatcttggctgactacggcaagaaaaacaatgtgaacgtggcatcactgacacaatcagaaattcgagacatcatcctgggtatggagatctcggcaccgtcacagcagcggcagcagatcgctgagatcgagaagcagaccaaggaacaatcgcagctgacggcaacacagactcgcactgtcaacaagcatggcgatgagatcatcacctccaccaccagcaactatgagacccagactttctcatccaagactgagtggagggtcagggccatctctgctgccaacctgcacctaaggaccaatcacatctatgtttcatctgacgacatcaaggagactggctacacctacatccttcccaagaatgtgcttaagaagttcatctgcatatctgaccttcgggcccaaattgcaggatacctatatggggtgagcccaccagataacccccaggtgaaggagatccgctgcattgtgatggtgccgcagtggggcactcaccagaccgtgcacctgcctggccagctgccccagcatgagtacctcaaggagatggaacccttaggttggatccacactcagcccaatgagtccccgcagttatcaccccaggatgtcaccacccatgccaagatcatggctgacaacccatcttgggatggcgagaagaccattatcatcacatgcagcttcacgccaggctcctgtacactgacggcctacaagctgacccccagtggctacgaatggggccgccagaacacagacaagggcaacaaccccaagggctacctgccttcacactatgagagggtgcagatgctgctgtcggaccgtttccttggcttcttcatggtccctgcccagtcctcgtggaactacaacttcatgggtgttcggcatgaccccaacatgaaatatgagctacagctggcgaaccccaaagagttctaccacgaggtgcacaggccctctcacttcctcaactttgctctcctgcaggagggggaggtttactctgcggatcgggaggacctgtatgcctga

SEQ ID NO: 23 - DNA, 597 bp, Homo sapiens
atgatagggtcgggattggctggctctggaggcgcaggtggtccttcttctactgtcacatggtgcgcgctgttttctaatcacgtggctgccacccaggcctctctgctcctgtcttttgtttggatgccggcgctgctgcctgtggcctcccgccttttgttgctaccccgagtcttgctgaccatggcctctggaagccctccgacccagccctcgccggcctcggattccggctctggctacgttccgggctcggtctctgcagcctttgttacttgccccaacgagaaggtcgccaaggagatcgccagggccgtggtggagaagcgcctagcagcctgcgtcaacctcatccctcagattacatccatctatgagtggaaagggaagatcgaggaagacagtgaggtgctgatgatgattaaaacccaaagttccttggtcccagctttgacagattttgttcgttctgtgcacccttacgaagtggccgaggtaattgcattgcctgtggaacaggggaactttccgtacctgcagtgggtgcgccaggtcacagagtcagtttctgactctatcacagtcctgccatga

SEQ ID NO: 24 - DNA, 1563 bp, Homo sapiens
atgccacagctgagcctgtcctcgctgggcctttggccaatggcagcatccccgtggctgctcctgctgctggttggggcctcctggctcctggcccgcatcctggcctggacctataccttctatgacaactgctgccgcctccggtgtttcccgcaacccccgaaacggaattggttcttgggtcacctgggcctgattcacagctcggaggaaggtctcctatacacacaaagcctggcatgcaccttcggtgatatgtgctgctggtgggtggggccctggcacgcaatcgtccgcatcttccaccccacctacatcaagcctgtgctctttgctccagctgccattgtaccaaaggacaaggtcttctacagcttcctgaagccctggctgggggatgggctcctgctgagtgctggtgaaaagtggagccgccaccgtcggatgctgacgcctgccttccatttcaacatcctgaagccctatatgaagattttcaatgagagtgtgaacatcatgcatgccaagtggcagctcctggcctcagagggtagtgcccgtctggacatgtttgagcacatcagcctcatgaccttggacagtctgcagaaatgtgtcttcagctttgacagccattgccaggagaagcccagtgaatatattgccgccatcttggagctcagtgcccttgtgacaaaaagacaccagcagatcctcctgtacatagacttcctgtattatctcacccctgatgggcagcgtttccgcagggcctgccgcctggtgcacgacttcacagatgccgtcatccaggagcggcgccgcaccctccctagccagggtgttgatgacttcctccaagccaaggccaaatccaagactttggacttcattgatgtactcctgctgagcaaggatgaagatgggaagaagttgtccgatgaggacataagagcagaagctgacacctttatgtttgagggccatgacaccacagccagtggtctctcctgggtcctgtaccaccttgcaaagcacccggaataccaggagcgctgtcggcaggaggtgcaagagcttctgaaggaccgtgagcctaaagagattgaatgggacgacctggcccagctgcccttcctgaccatgtgcattaaggagagcctgaggctgcatcccccagtccctgccgtctctcgctgctgcacccaagacattgtgctcccagacggccgggtcatccccaaaggcattatctgcctcatcagtgtttttggaacccatcacaacccagccgtgtggccggaccctgaggtctatgacccctttcgctttgacccaaagaacatcaaggagaggtcacctctggcttttattcccttctcagcagggcccaggaactgcatcgggcaggcgttcgcgatggcggagatgaaggtggtcctggggctcacgctgctgcgcttccgcgtcctgcctgaccacaccgagccccgcaggaagccggagctggtcctgcgcgcagagggcggactttggctgcgggtggagcccctgagctga

SEQ ID NO: 25 - DNA, 960 bp, Homo sapiens
atgctcttttgggtgctaggcctcctaatcctctgtggttttctgtggactcgtaaaggaaaactaaagattgaagacatcactgataagtacatttttatcactggatgtgactcgggctttggaaacttggcagccagaacttttgataaaaagggatttcatgtaatcgctgcctgtctgactgaatcaggatcaacagctttaaaggcagaaacctcagagagacttcgtactgtgcttctggatgtgaccgacccagagaatgtcaagaggactgcccagtgggtgaagaaccaagttggggagaaaggtctctggggtctgatcaataatgctggtgttcccggcgtgctggctcccactgactggctgacactagaggactacagagaacctattgaagtgaacctgtttggactcatcagtgtgacactaaatatgcttcctttggtcaagaaagctcaagggagagttattaatgtctccagtgttggaggtcgccttgcaatcgttggagggggctatactccatccaaatatgcagtggaaggtttcaatgacagcttaagacgggacatgaaagcttttggtgtgcacgtctcatgcattgaaccaggattgttcaaaacaaacttggcagatccagtaaaggtaattgaaaaaaaactcgccatttgggagcagctgtctccagacatcaaacaacaatatggagaaggttacattgaaaaaagtctagacaaactgaaaggcaataaatcctatgtgaacatggacctctctccggtggtagagtgcatggaccacgctctaacaagtctcttccctaagactcattatgccgctggaaaagatgccaaaattttctggatacctctgtctcacatgccagcagctttgcaagactttttattgttgaaacagaaagcagagctggctaatcccaaggcagtgtga

SEQ ID NO: 26 - DNA, 4361 bp, Homo sapiens
tcgtggggcgggggtggggcgggactgagggcggagtgtgagcgggctcggttttgggccgcggcgggagcgggagtcgccgccactcgagtgcgcaggcgcctggcgattaccggtctcaccatggagcggaaagtgcttgcgctccaggcccgaaagaaaaggaccaaggccaagaaggacaaagcccaaaggaaatctgaaactcagcaccgaggctctgctccccactctgagagtgatctaccagagcaggaagaggagattctgggatctgatgatgatgagcaagaagatcctaatgattattgtaaaggaggttatcatcttgtgaaaattggagatctattcaatgggagataccatgtgatccgaaagttaggctggggacacttttcaacagtatggttatcatgggatattcaggggaagaaatttgtggcaatgaaagtagttaaaagtgctgaacattacactgaaacagcactagatgaaatccggttgctgaagtcagttcgcaattcagaccctaatgatccaaatagagaaatggttgttcaactactagatgactttaaaatatcaggagttaatggaacacatatctgcatggtatttgaagttttggggcatcatctgctcaagtggatcatcaaatccaattatcaggggcttccactgccttgtgtcaaaaaaattattcagcaagtgttacagggtcttgattatttacataccaagtgccgtatcatccacactgacattaaaccagagaacatcttattgtcagtgaatgagcagtacattcggaggctggctgcagaagcaacagaatggcagcgatctggagctcctccgccttccggatctgcagtcagtactgctccccagcctaaaccagctgacaaaatgtcaaagaataagaagaagaaattgaagaagaagcagaagcgccaggcagaattactagagaagcgaatgcaggaaattgaggaaatggagaaagagtcgggccctgggcaaaaaagaccaaacaagcaagaagaatcagagagtcctgttgaaagacccttgaaagagaacccacctaataaaatgacccaagaaaaacttgaagagtcaagtaccattggccaggatcaaacgcttatggaacgtgatacagagggtggtgcagcagaaattaattgcaatggagtgattgaagtcattaattatactcagaacagtaataatgaaacattgagacataaagaggatctacataatgctaatgactgtgatgtccaaaatttgaatcaggaatctagtttcctaagctcccaaaatggagacagcagcacatctcaagaaacagactcttgtacacctataacatctgaggtgtcagacaccatggtgtgccagtcttcctcaactgtaggtcagtcattcagtgaacaacacattagccaacttcaagaaagcattcgggcagagataccctgtgaagatgaacaagagcaagaacataacggaccactggacaacaaaggaaaatccacggctggaaattttcttgttaatccccttgagccaaaaaatgcagaaaagctcaaggtgaagattgctgaccttggaaatgcttgttgggtgcacaaacatttcactgaagatattcaaacaaggcaatatcgttccttggaagttctaatcggatctggctataatacccctgctgacatttggagcacggcatgcatggcctttgaactggccacaggtgactatttgtttgaacctcattcaggggaagagtacactcgagatgaagatcacattgcattgatcatagaacttctggggaaggtgcctcgcaagctcattgtggcaggaaaatattccaaggaatttttcaccaaaaaaggtgacctgaaacatatcacgaagctgaaaccttggggcctttttgaggttctagtggagaagtatgagtggtcgcaggaagaggcagctggcttcacagatttcttactgcccatgttggagctgatccctgagaagagagccactgccgccgagtgtctccggcacccttggcttaactcctaagcccctgcccagcaccacagcagagatcacacactgaccctccgcccttccccttcaagcattttcctcttcccttttcagggtgaagctcttccttcaagagtttctagatcttgttttttttttaatccaacatgttcatttgggtttgcttacttgaccctgtggagatccccacagccattgggcatcctaggtgaatttggccttggttgggctctgccaaagactaatggactaaaatgtgaaacagcctcttgccctgtacctttccttcccattaggacatcctttaaattataagcatcctttttgaaaagagctatgaaggtgtatgagcccatccttttattcattgactctaagagtcaaattttctagtgcatatcctattgccagcataaggatgaggagggggaaagggtcttaattctatgtacagcagagacattaaacttgctgtgtccgggctgcatcatcttcctggactgtttctgttgttctctgtgttcacattttttcctgcaacttttaagctactgtcttttttaaatagctatatgaacaccaaatttgggtaccattttatcactgttcaaagcactgtcaaattcctttcatcctttaatagttaagatctttgaatcttcagtctgatttttaatgtaagcaaaaacagaaccattgaatagtaatttcttgagaacctcaggtgttctataaacagtcctttcctgtatgtcttctattaccctaagaccagagttattttggttggttgttttgttttattttttgtttttgtatccatggctggcactttactcattgcacttgagtttattgccccataactaaaggatcaggatgatggtagaacggagatctgggtttcagagctttcccatttaagaaaaatagatcttgagattctaattcttttccaaacagtcccctgctttcatgtacagctttttctttaccttacccaaaattctggccttgaagcagttttcctctatggctttgcctttctgattttctcagaggctcgagtctttaatataaccccaaatgaaagaaccaaggggaggggtgggatggcacttttttttgttggtcttgttttgttttgttttttggttggttggttcgttattttttaagattagccattctctgctgctatttccctacataatgtcaatttttaaccataattttgacatgattgagatgtacttgaggcttttttgttttaattgagaaaagactttgcaattttttttttaggatgagcctctcctagacttgacctagaatattacatattcctccagtaagtaatactgaagagcaaaagagaggcaggattggggtcacagccgcttcttcagcatggaccaagtgggccttggggattgcagcgttctcgaagtggctgtaggactcgaatttacagaaagccacagaggtgcaacttgaggctctgctagcaagccaccagtgaggctattgggtaaccacctttctatacaggagattggaatctactttgtcatttatccaccacagtgacaaaggaaaagtggtgccgttatgcaatccatttaactcataaacatattactctgagtaactggccagccattcatcggatccttcattgggtactcctgaaatcagacatgttcctgtagaaagaattttaagttaggctttctatgcacctatcaagaatcaagagaatagattgtatcaaacaacggcagggaaatccttcagcaattctaatccactttgggttttcagctgtttttacatctaaagcaatagactagaactgaattatcttctacatagtaaaatcacaattgtggaattacaggaattctggtgatattaaggtgaaataacaaaacacaaaaggccctattttaacagttgatgtgacagtaagttttaatagaacctgtaacttcattttggaaatgcttctccaccaaataagggctttttcccctatttaaggagccagatggattgaaagatgtggaaataggcagctgtagatcttgatcttccaggtaccccatgtacctttattgagcttaattataatactgtcaaattgccacgatctcactaaaggatttctatttgctgtcagttaaaaataaagccctaaatacatttttattctttctactgagggcattgtctgttttctttgtaaatgccgtacaataaacaaattatttaataaccta

SEQ ID NO: 27 - DNA, 939 bp, Homo sapiens
atgcggatgctgctggcgctcctggccctctccgcggcgcggccatcggccagtgcagagtcacactggtgctacgaggttcaagccgagtcctccaactacccctgcttggtgccagtcaagtggggtggaaactgccagaaggaccgccagtcccccatcaacatcgtcaccaccaaggcaaaggtggacaaaaaactgggacgcttcttcttctctggctacgataagaagcaaacgtggactgtccaaaataacgggcactcagtgatgatgttgctggagaacaaggccagcatttctggaggaggactgcctgccccataccaggccaaacagttgcacctgcactggtccgacttgccatataagggctcggagcacagcctcgatggggagcactttgccatggagatgcacatagtacatgagaaagagaaggggacatcgaggaatgtgaaagaggcccaggaccctgaagacgaaattgcggtgctggcctttctggtggaggctggaacccaggtgaacgagggcttccagccactggtggaggcactgtctaatatccccaaacctgagatgagcactacgatggcagagagcagcctgttggacctgctccccaaggaggagaaactgaggcactacttccgctacctgggctcactcaccacaccgacctgcgatgagaaggtcgtctggactgtgttccgggagcccattcagcttcacagagaacagatcctggcattctctcagaagctgtactacgacaaggaacagacagtgagcatgaaggacaatgtcaggcccctgcagcagctggggcagcgcacggtgataaagtccggggccccgggtcggccgctgccctgggccctgcctgccctgctgggccccatgctggcctgcctgctggccggcttcctgcgatga

SEQ ID NO: 28 - DNA, 1527 bp, Homo sapiens
atgatttatgaggaatccaagatgaatttggagcaggagaggccgtttgtctgcagtgccccaggctgctcccagcgcttcccaacagaggaccatctgatgattcataggcacaaacatgaaatgactttgaagtttccttcaataaaaacagacaatatgttatcagatcaaactccgaccccaacgagattcctgaagaactgcgaggaggtgggcctcttcagcgagctggactgctccctggagcacgagttcaggaaggctcaggaagaggagagcagcaagcggaatatctcgatgcataatgcagttggtggggccatgacggggcccggaactcaccagcttagcagcgctcggctgcccaaccatgacaccaacgttgtgattcagcaagccatgccgtcgcctcagtccagctctgtcatcactcaggcaccttccaccaaccgccagatcgggcctgtcccaggctctctatcttctctgctacatctccacaacagacagagacagcccatgccagcctccatgcctgggaccctgcccaaccctacaatgccaggatcttccgccgtcttgatgccaatggagcgacaaatgtcagtgaactccagcatcatggggatgcaaggtccaaatctcagcaacccctgtgcttctccccaggtccagccaatgcattcagaagccaaaatgaggttgaaggctgcattgactcaccaccctgctgccatgtcaaatgggaacatgaacaccatgggacacatgatggagatgatgggctcccggcaggaccagacgccacaccatcacatgcactcgcacccgcatcagcaccagacactgccaccccatcacccttacccacaccagcaccagcacccagcacaccatcctcaccctcaaccccatcaccagcagaaccatccacatcaccactcccattcccaccttcatgcacacccagcacatcaccagacctcgccacatccgcccctgcacaccggcaaccaagcacaggtttcaccagcaacacaacagatgcagccaacccagacaatacagccaccccagcccacaggggggcgccggcgaagggtggtagacgaggatccggacgagaggcggcggaaatttctggaacggaaccgggcagctgccacccgctgcagacagaagaggaaggtctgggtgatgtcattggaaaagaaagcagaagaactcacccagacaaacatgcagcttcagaatgaagtgtctatgttgaaaaatgaggtggcccagctgaaacagttgttgttaacacataaagactgcccaataacagccatgcagaaagaatcacaaggatatctaagtccagagagtagccctcctgctagtcctgtcccagcttgctcccagcaacaagtcatccagcataataccatcactacttcctcatcggtcagcgaggtggtaggaagctccaccctcagccagctcaccactcacagaacagacctgaatccgattctttaa

SEQ ID NO: 29 - DNA, 6786 bp, Homo sapiens
atggcttgttggcctcagctgaggttgctgctgtggaagaacctcactttcagaagaagacaaacatgtcagctgctgctggaagtggcctggcctctatttatcttcctgatcctgatctctgttcggctgagctacccaccctatgaacaacatgaatgccattttccaaataaagccatgccctctgcaggaacacttccttgggttcaggggattatctgtaatgccaacaacccctgtttccgttacccgactcctggggaggctcccggagttgttggaaactttaacaaatccattgtggctcgcctgttctcagatgctcggaggcttcttttatacagccagaaagacaccagcatgaaggacatgcgcaaagttctgagaacattacagcagatcaagaaatccagctcaaacttgaagcttcaagatttcctggtggacaatgaaaccttctctgggttcctgtatcacaacctctctctcccaaagtctactgtggacaagatgctgagggctgatgtcattctccacaaggtatttttgcaaggctaccagttacatttgacaagtctgtgcaatggatcaaaatcagaagagatgattcaacttggtgaccaagaagtttctgagctttgtggcctaccaagggagaaactggctgcagcagagcgagtacttcgttccaacatggacatcctgaagccaatcctgagaacactaaactctacatctcccttcccgagcaaggagctggctgaagccacaaaaacattgctgcatagtcttgggactctggcccaggagctgttcagcatgagaagctggagtgacatgcgacaggaggtgatgtttctgaccaatgtgaacagctccagctcctccacccaaatctaccaggctgtgtctcgtattgtctgcgggcatcccgagggaggggggctgaagatcaagtctctcaactggtatgaggacaacaactacaaagccctctttggaggcaatggcactgaggaagatgctgaaaccttctatgacaactctacaactccttactgcaatgatttgatgaagaatttggagtctagtcctctttcccgcattatctggaaagctctgaagccgctgctcgttgggaagatcctgtatacacctgacactccagccacaaggcaggtcatggctgaggtgaacaagaccttccaggaactggctgtgttccatgatctggaaggcatgtgggaggaactcagccccaagatctggaccttcatggagaacagccaagaaatggaccttgtccggatgctgttggacagcagggacaatgaccacttttgggaacagcagttggatggcttagattggacagcccaagacatcgtggcgtttttggccaagcacccagaggatgtccagtccagtaatggttctgtgtacacctggagagaagctttcaacgagactaaccaggcaatccggaccatatctcgcttcatggagtgtgtcaacctgaacaagctagaacccatagcaacagaagtctggctcatcaacaagtccatggagctgctggatgagaggaagttctgggctggtattgtgttcactggaattactccaggcagcattgagctgccccatcatgtcaagtacaagatccgaatggacattgacaatgtggagaggacaaataaaatcaaggatgggtactgggaccctggtcctcgagctgacccctttgaggacatgcggtacgtctgggggggcttcgcctacttgcaggatgtggtggagcaggcaatcatcagggtgctgacgggcaccgagaagaaaactggtgtctatatgcaacagatgccctatccctgttacgttgatgacatctttctgcgggtgatgagccggtcaatgcccctcttcatgacgctggcctggatttactcagtggctgtgatcatcaagggcatcgtgtatgagaaggaggcacggctgaaagagaccatgcggatcatgggcctggacaacagcatcctctggtttagctggttcattagtagcctcattcctcttcttgtgagcgctggcctgctagtggtcatcctgaagttaggaaacctgctgccctacagtgatcccagcgtggtgtttgtcttcctgtccgtgtttgctgtggtgacaatcctgcagtgcttcctgattagcacactcttctccagagccaacctggcagcagcctgtgggggcatcatctacttcacgctgtacctgccctacgtcctgtgtgtggcatggcaggactacgtgggcttcacactcaagatcttcgctagcctgctgtctcctgtggcttttgggtttggctgtgagtactttgccctttttgaggagcagggcattggagtgcagtgggacaacctgtttgagagtcctgtggaggaagatggcttcaatctcaccacttcggtctccatgatgctgtttgacaccttcctctatggggtgatgacctggtacattgaggctgtctttccaggccagtacggaattcccaggccctggtattttccttgcaccaagtcctactggtttggcgaggaaagtgatgagaagagccaccctggttccaaccagaagagaatatcagaaatctgcatggaggaggaacccacccacttgaagctgggcgtgtccattcagaacctggtaaaagtctaccgagatgggatgaaggtggctgtcgatggcctggcactgaatttttatgagggccagatcacctccttcctgggccacaatggagcggggaagacgaccaccatgtcaatcctgaccgggttgttccccccgacctcgggcaccgcctacatcctgggaaaagacattcgctctgagatgagcaccatccggcagaacctgggggtctgtccccagcataacgtgctgtttgacatgctgactgtcgaagaacacatctggttctatgcccgcttgaaagggctctctgagaagcacgtgaaggcggagatggagcagatggccctggatgttggtttgccatcaagcaagctgaaaagcaaaacaagccagctgtcaggtggaatgcagagaaagctatctgtggccttggcctttgtcgggggatctaaggttgtcattctggatgaacccacagctggtgtggacccttactcccgcaggggaatatgggagctgctgctgaaataccgacaaggccgcaccattattctctctacacaccacatggatgaagcggacgtcctgggggacaggattgccatcatctcccatgggaagctgtgctgtgtgggctcctccctgtttctgaagaaccagctgggaacaggctactacctgaccttggtcaagaaagatgtggaatcctccctcagttcctgcagaaacagtagtagcactgtgtcatacctgaaaaaggaggacagtgtttctcagagcagttctgatgctggcctgggcagcgaccatgagagtgacacgctgaccatcgatgtctctgctatctccaacctcatcaggaagcatgtgtctgaagcccggctggtggaagacatagggcatgagctgacctatgtgctgccatatgaagctgctaaggagggagcctttgtggaactctttcatgagattgatgaccggctctcagacctgggcatttctagttatggcatctcagagacgaccctggaagaaatattcctcaaggtggccgaagagagtggggtggatgctgagacctcagatggtaccttgccagcaagacgaaacaggcgggccttcggggacaagcagagctgtcttcgcccgttcactgaagatgatgctgctgatccaaatgattctgacatagacccagaatccagagagacagacttgctcagtgggatggatggcaaagggtcctaccaggtgaaaggctggaaacttacacagcaacagtttgtggcccttttgtggaagagactgctaattgccagacggagtcggaaaggattttttgctcagattgtcttgccagctgtgtttgtctgcattgcccttgtgttcagcctgatcgtgccaccctttggcaagtaccccagcctggaacttcagccctggatgtacaacgaacagtacacatttgtcagcaatgatgctcctgaggacacgggaaccctggaactcttaaacgccctcaccaaagaccctggcttcgggacccgctgtatggaaggaaacccaatcccagacacgccctgccaggcaggggaggaagagtggaccactgccccagttccccagaccatcatggacctcttccagaatgggaactggacaatgcagaacccttcacctgcatgccagtgtagcagcgacaaaatcaagaagatgctgcctgtgtgtcccccaggggcaggggggctgcctcctccacaaagaaaacaaaacactgcagatatccttcaggacctgacaggaagaaacatttcggattatctggtgaagacgtatgtgcagatcatagccaaaagcttaaagaacaagatctgggtgaatgagtttaggtatggcggcttttccctgggtgtcagtaatactcaagcacttcctccgagtcaagaagttaatgatgccatcaaacaaatgaagaaacacctaaagctggccaaggacagttctgcagatcgatttctcaacagcttgggaagatttatgacaggactggacaccaaaaataatgtcaaggtgtggttcaataacaagggctggcatgcaatcagctctttcctgaatgtcatcaacaatgccattctccgggccaacctgcaaaagggagagaaccctagccattatggaattactgctttcaatcatcccctgaatctcaccaagcagcagctctcagaggtggctctgatgaccacatcagtggatgtccttgtgtccatctgtgtcatctttgcaatgtccttcgtcccagccagctttgtcgtattcctgatccaggagcgggtcagcaaagcaaaacacctgcagttcatcagtggagtgaagcctgtcatctactggctctctaattttgtctgggatatgtgcaattacgttgtccctgccacactggtcattatcatcttcatctgcttccagcagaagtcctatgtgtcctccaccaatctgcctgtgctagcccttctacttttgctgtatgggtggtcaatcacacctctcatgtacccagcctcctttgtgttcaagatccccagcacagcctatgtggtgctcaccagcgtgaacctcttcattggcattaatggcagcgtggccacctttgtgctggagctgttcaccgacaataagctgaataatatcaatgatatcctgaagtccgtgttcttgatcttcccacatttttgcctgggacgagggctcatcgacatggtgaaaaaccaggcaatggctgatgccctggaaaggtttggggagaatcgctttgtgtcaccattatcttgggacttggtgggacgaaacctcttcgccatggccgtggaaggggtggtgttcttcctcattactgttctgatccagtacagattcttcatcaggcccagacctgtaaatgcaaagctatctcctctgaatgatgaagatgaagatgtgaggcgggaaagacagagaattcttgatggtggaggccagaatgacatcttagaaatcaaggagttgacgaagatatatagaaggaagcggaagcctgctgttgacaggatttgcgtgggcattcctcctggtgagtgctttgggctcctgggagttaatggggctggaaaatcatcaactttcaagatgttaacaggagataccactgttaccagaggagatgctttccttaacaaaaatagtatcttatcaaacatccatgaagtacatcagaacatgggctactgccctcagtttgatgccatcacagagctgttgactgggagagaacacgtggagttctttgcccttttgagaggagtcccagagaaagaagttggcaaggttggtgagtgggcgattcggaaactgggcctcgtgaagtatggagaaaaatatgctggtaactatagtggaggcaacaaacgcaagctctctacagccatggctttgatcggcgggcctcctgtggtgtttctggatgaacccaccacaggcatggatcccaaagcccggcggttcttgtggaattgtgccctaagtgttgtcaaggaggggagatcagtagtgcttacatctcatagtatggaagaatgtgaagctctttgcactaggatggcaatcatggtcaatggaaggttcaggtgccttggcagtgtccagcatctaaaaaataggtttggagatggttatacaatagttgtacgaatagcagggtccaacccggacctgaagcctgtccaggatttctttggacttgcatttcctggaagtgttctaaaagagaaacaccggaacatgctacaataccagcttccatcttcattatcttctctggccaggatattcagcatcctctcccagagcaaaaagcgactccacatagaagactactctgtttctcagacaacacttgaccaagtatttgtgaactttgccaaggaccaaagtgatgatgaccacttaaaagacctctcattacacaaaaaccagacagtagtggacgttgcagttctcacatcttttctacaggatgagaaagtgaaagaaagctatgtatga

SEQ ID NO: 30 - DNA, 387 bp, Homo sapiens
atgagcctcagacttgataccaccccttcctgtaacagtgcgagaccacttcatgccttgcaggtgctgctgcttctgtcattgctgctgactgctctggcttcctccaccaaaggacaaactaagagaaacttggcgaaaggcaaagaggaaagtctagacagtgacttgtatgctgaactccgctgcatgtgtataaagacaacctctggaattcatcccaaaaacatccaaagtttggaagtgatcgggaaaggaacccattgcaaccaagtcgaagtgatagccacactgaaggatgggaggaaaatctgcctggacccagatgctcccagaatcaagaaaattgtacagaaaaaattggcaggtgatgaatctgctgattaa

SEQ ID NO: 31 - DNA, 288 bp, Homo sapiens
atgacggaactagagacagccatgggcatgatcatagacgtcttttcccgatattcgggcagcgagggcagcacgcagaccctgaccaagggggagctcaaggtgctgatggagaaggagctaccaggcttcctgcagagtggaaaagacaaggatgccgtggataaattgctcaaggacctggatgccaatggagatgcccaggtggacttcagtgagttcatagtgttcgtggctgcaatcacgtctgcctgtcacaagtactttgagaaggcaggactcaaatga

SEQ ID NO: 32 - DNA, 1791 bp, Homo sapiens
atggcggggaactgtggggcccgcggcgcgctgtcggcgcacacgctgctgttcgacctgccgcccgcgctgctcggagagctctgcgctgttctggacagctgcgacggcgcgctgggctggcgcggcctggcagagagactttcaagcagctggctggatgttcgtcatattgaaaagtatgtagaccaaggtaaaagtggaacaagagaattactttggtcctgggcacagaaaaacaagaccatcggtgaccttttacaggtcctccaggagatgggacatcgtcgagctattcatttaattacaaactatggagcagtgttgagtccttcagagaagagttatcaggaaggtggatttccaaatatattattcaaggaaacagccaatgtcaccgtggataatgttcttattcctgaacataatgaaaaaggaatactgcttaaatcttccatcagctttcaaaatatcatagaaggaactagaaatttccacaaagacttcctaattggagaaggagagatttttgaggtatacagagtggagattcaaaacctaacatatgctgtcaaattatttaaacaggagaaaaaaatgcagtgtaagaagcattggaagaggtttttatctgagcttgaagttttactactgtttcatcacccaaacatactagagttggctgcatattttacagagactgagaagttctgtctgatttatccatacatgagaaatggaacactttttgacagattgcagtgtgtaggtgacacggccccactcccttggcacattcgaatcggtatattaataggaatatccaaagccattcactacctgcacaacgttcaaccatgctcggtcatctgtggcagtatatcaagtgcaaacatccttttggatgatcagtttcaacccaaactaactgattttgccatggcacacttccggtcccacctagaacatcagagttgtaccataaatatgaccagcagcagcagtaaacatctgtggtacatgccagaagagtacatcagacaggggaaactttccattaaaacagatgtctacagctttggaattgtaataatggaagttctaacaggatgtagagtagtgttagatgatccaaaacatatccagctgcgggatctccttagagaattgatggagaagagaggcctggattcatgtctctcatttctagataagaaagtgcctccctgccctcggaatttctctgccaagctcttctgtttggcaggccggtgtgctgcaacgcgggcaaagttaagaccatcaatggatgaagttttaaatactcttgaaagtactcaagccagcttgtattttgctgaagatcctcccacatcactaaagtccttcaggtgtccttctcctctattcctggagaatgtaccaagtattccagtggaagatgatgaaagccagaataacaatttactaccttctgatgaaggcctgaggatagacagaatgactcagaaaactccttttgaatgcagccagtctgaggttatgtttctgagcttggacaaaaagccagagagcaagagaaatgaggaagcttgcaacatgcccagttcttcttgtgaagaaagttggttcccaaagtatatagttccatcccaggacttaaggccctataaggtaaatatagatccttcttcagaagctccagggcattcttgcaggagcaggccagtggagagcagctgttcctccaaattttcctgggatgaatatgaacagtacaaaaaagaataa

SEQ ID NO: 33 - DNA, 1800 bp, Homo sapiens
atgctctgtttgggctggatatttctttggcttgttgcaggagagcgaattaaaggatttaatatttcaggttgttccacaaaaaaactcctttggacatattctacaaggagtgaagaggaatttgtcttattttgtgatttaccagagccacagaaatcacatttctgccacagaaatcgactctcaccaaaacaagtccctgagcacctgcccttcatgggtagtaacgacctatctgatgtccaatggtaccaacaaccttcgaatggagatccattagaggacattaggaaaagctatcctcacatcattcaggacaaatgtacccttcactttttgaccccaggggtgaataattctgggtcatatatttgtagacccaagatgattaagagcccctatgatgtagcctgttgtgtcaagatgattttagaagttaagccccagacaaatgcatcctgtgagtattccgcatcacataagcaagacctacttcttgggagcactggctctatttcttgccccagtctcagctgccaaagtgatgcacaaagtccagcggtaacctggtacaagaatggaaaactcctctctgtggaaaggagcaaccgaatcgtagtggatgaagtttatgactatcaccagggcacatatgtatgtgattacactcagtcggatactgtgagttcgtggacagtcagagctgttgttcaagtgagaaccattgtgggagacactaaactcaaaccagatattctggatcctgtcgaggacacactggaagtagaacttggaaagcctttaactattagctgcaaagcacgatttggctttgaaagggtctttaaccctgtcataaaatggtacatcaaagattctgacctagagtgggaagtctcagtacctgaggcgaaaagtattaaatccactttaaaggatgaaatcattgagcgtaatatcatcttggaaaaagtcactcagcgtgatcttcgcaggaagtttgtttgctttgtccagaactccattggaaacacaacccagtccgtccaactgaaagaaaagagaggagtggtgctcctgtacatcctgcttggcaccatcgggaccctggtggccgtgctggcggcgagtgccctcctctacaggcactggattgaaatagtgctgctgtaccggacctaccagagcaaggatcagacgcttggggataaaaaggattttgatgctttcgtatcctatgcaaaatggagctcttttccaagtgaggccacttcatctctgagtgaagaacacttggccctgagcctatttcctgatgttttagaaaacaaatatggatatagcctgtgtttgcttgaaagagatgtggctccaggaggagtgtatgcagaagacattgtgagcattattaagagaagcagaagaggaatatttatcttgagccccaactatgtcaatggacccagtatctttgaactacaagcagcagtgaatcttgccttggatgatcaaacactgaaactcattttaattaagttctgttacttccaagagccagagtctctacctcatctcgtgaaaaaagctctcagggttttgcccacagttacttggagaggcttaaaatcagttcctcccaattctaggttctgggccaaaatgcgctaccacatgcctgtgaaaaactctcagggattcacgtggaaccagctcagaattacctctaggatttttcagtggaaaggactcagtagaacagaaaccactgggaggagctcccagcctaaggaatggtga

SEQ ID NO: 34 - DNA, 1626 bp, Homo sapiens
atgaattgtagagaattacccttgaccctttgggtgcttatatctgtaagcactgcagaatcttgtacttcacgtccccacattactgtggttgaaggggaacctttctatctgaaacattgctcgtgttcacttgcacatgagattgaaacaaccaccaaaagctggtacaaaagcagtggatcacaggaacatgtggagctgaacccaaggagttcctcgagaattgctttgcatgattgtgttttggagttttggccagttgagttgaatgacacaggatcttactttttccaaatgaaaaattatactcagaaatggaaattaaatgtcatcagaagaaataaacacagctgtttcactgaaagacaagtaactagtaaaattgtggaagttaaaaaattttttcagataacctgtgaaaacagttactatcaaacactggtcaacagcacatcattgtataagaactgtaaaaagctactactggagaacaataaaaacccaacgataaagaagaacgccgagtttgaagatcaggggtattactcctgcgtgcatttccttcatcataatggaaaactatttaatatcaccaaaaccttcaatataacaatagtggaagatcgcagtaatatagttccggttcttcttggaccaaagcttaaccatgttgcagtggaattaggaaaaaacgtaaggctcaactgctctgctttgctgaatgaagaggatgtaatttattggatgttcggggaagaaaatggatcggatcctaatatacatgaagagaaagaaatgagaattatgactccagaaggcaaatggcatgcttcaaaagtattgagaattgaaaatattggtgaaagcaatctaaatgttttatataattgcactgtggccagcacgggaggcacagacaccaaaagcttcatcttggtgagaaaagcagacatggctgatatcccaggccacgtcttcacaagaggaatgatcatagctgttttgatcttggtggcagtagtgtgcctagtgactgtgtgtgtcatttatagagttgacttggttctattttatagacatttaacgagaagagatgaaacattaacagatggaaaaacatatgatgcttttgtgtcttacctaaaagaatgccgacctgaaaatggagaggagcacacctttgctgtggagattttgcccagggtgttggagaaacattttgggtataagttatgcatatttgaaagggatgtagtgcctggaggagctgttgttgatgaaatccactcactgatagagaaaagccgaagactaatcattgtcctaagtaaaagttatatgtctaatgaggtcaggtatgaacttgaaagtggactccatgaagcattggtggaaagaaaaattaaaataatcttaattgaatttacacctgttactgacttcacattcttgccccaatcactaaagcttttgaaatctcacagagttctgaagtggaaggccgataaatctctttcttataactcaaggttctggaagaaccttctttacttaatgcctgcaaaaacagtcaagccaggtagagacgaaccggaagtcttgcctgttctttccgagtcttaa

SEQ ID NO: 35 - DNA, 834 bp, Homo sapiens
atgatcatcttaatttacttatttctcttgctatgggaagacactcaaggatggggattcaaggatggaatttttcataactccatatggcttgaacgagcagccggtgtgtaccacagagaagcacggtctggcaaatacaagctcacctacgcagaagctaaggcggtgtgtgaatttgaaggcggccatctcgcaacttacaagcagctagaggcagccagaaaaattggatttcatgtctgtgctgctggatggatggctaagggcagagttggataccccattgtgaagccagggcccaactgtggatttggaaaaactggcattattgattatggaatccgtctcaataggagtgaaagatgggatgcctattgctacaacccacacgcaaaggagtgtggtggcgtctttacagatccaaagcaaatttttaaatctccaggcttcccaaatgagtacgaagataaccaaatctgctactggcacattagactcaagtatggtcagcgtattcacctgagttttttagattttgaccttgaagatgacccaggttgcttggctgattatgttgaaatatatgacagttacgatgatgtccatggctttgtgggaagatactgtggagatgagcttccagatgacatcatcagtacaggaaatgtcatgaccttgaagtttctaagtgatgcttcagtgacagctggaggtttccaaatcaaatatgttgcaatggatcctgtatccaaatccagtcaaggaaaaaatacaagtactacttctactggaaataaaaactttttagctggaagatttagccacttataa

SEQ ID NO: 36 - DNA, 897 bp, Homo sapiens
atgacagatgccgctgtgtccttcgccaaggacttcctggcaggtggagtggccgcagccatctccaagacggcggtagcgcccatcgagcgggtcaagctgctgctgcaggtgcagcatgccagcaagcagatcactgcagataagcaatacaaaggcattatagactgcgtggtccgtattcccaaggagcagggagttctgtccttctggcgcggtaacctggccaatgtcatcagatacttccccacccaggctcttaacttcgccttcaaagataaatacaagcagatcttcctgggtggtgtggacaagagaacccagttttggctctactttgcagggaatctggcatcgggtggtgccgcaggggccacatccctgtgttttgtgtaccctcttgattttgcccgtacccgtctagcagctgatgtgggtaaagctggagctgaaagggaattccgaggcctcggtgactgcctggttaagatctacaaatctgatgggattaagggcctgtaccaaggctttaacgtgtctgtgcagggtattatcatctaccgagccgcctacttcggtatctatgacactgcaaagggaatgcttccggatcccaagaacactcacatcgtcatcagctggatgatcgcacagactgtcactgctgttgccgggttgacttcctatccatttgacactgttcgccgccgcatgatgatgcagtcagggcgcaaaggaactgacatcatgtacacaggcacgcttgactgctggcggaagattgctcgtgatgaaggaggcaaagcttttttcaagggtgcatggtccaatgttctcagaggcatgggtggtgcttttgtgcttgtcttgtatgatgaaatcaagaagtacacataa

SEQ ID NO: 37 - DNA, 2580 bp, Homo sapiens
atgaagttgaaggacacaaaatcaaggccaaagcagtcaagctgtggcaaatttcagacaaagggaatcaaagttgtgggaaaatggaaggaagtgaagattgacccaaatatgtttgcagatggacagatggatgacttggtgtgctttgaggaattgacagattaccagttggtctcccctgccaagaatccctccagtctcttctcaaaggaagcacccaagagaaaggcacaagctgtttcagaagaagaggaggaggaggagggaaagtctagctcaccaaagaaaaagatcaagttgaagaaaagtaaaaatgtagcaactgaaggaaccagtacccagaaagaatttgaagtgaaagatcctgagctggaggcccagggagatgacatggtttgtgatgatccggaggctggggagatgacatcagaaaacctggtccaaactgctccaaaaaagaagaaaaataaagggaaaaaagggttggagccttctcagagcactgctgccaaggtgcccaaaaaagcgaagacatggattcctgaagttcatgatcagaaagcagatgtgtcagcttggaaggacctgtttgttcccaggccggttctccgagcactcagctttctaggcttctctgcacccacaccaatccaagccctgaccttggcacctgccatccgtgacaaactggacatccttggggctgctgagacaggaagtgggaaaactcttgcctttgccatcccaatgattcatgcggtgttgcagtggcagaagaggaatgctgcccctcctccaagtaacaccgaagcaccacctggagagaccagaactgaggccggagctgagactagatcaccaggcaaggctgaagctgagtctgatgcattgcctgacgatactgtaattgagagtgaagcactgcccagtgatattgcagccgaggccagagccaagactggaggcactgtctcagaccaggcgttgctctttggtgacgatgatgctggtgaagggccttcttccctgatcagggagaaacctgttcccaaacagaatgagaatgaggaggaaaatcttgataaagagcagactggaaatctaaaacaggagttggatgacaaaagcgccacctgtaaggcatatccaaagcgtcctctgcttggactggttctgactcccactcgagagctggccgtccaggtcaaacagcacattgatgctgtggccaggtttacaggaattaaaactgctattttggttggtggaatgtccacgcagaaacagcagaggatgctgaaccgtcgtcctgagattgtggttgctactccaggccggctgtgggaattaattaaagaaaagcattatcatttgaggaaccttcggcagctcaggtgcctggtagtggatgaggctgaccggatggttgagaaaggccattttgctgagctctcacagctgctagagatgctcaatgactcccaatacaacccaaagagacaaacgcttgttttttctgccacactcaccctggtgcatcaggctcctgctcgaatccttcataagaagcacaccaagaaaatggataaaacagccaaacttgacctccttatgcagaaaattggcatgaggggcaagcccaaggtcattgacctcacaaggaatgaggccacggtggagacgctaacagagaccaagatccattgtgagactgatgagaaagacttctacttgtactacttcctgatgcagtatccaggccgcagcttagtgtttgccaacagtatctcctgcatcaaacgcctctctgggctcctcaaagtccttgatatcatgcccttgaccctgcatgcctgtatgcaccagaagcagaggctcagaaacctggagcagtttgcccgtctggaagactgtgttctcttggcaacagatgtggcagctcggggtctggatattcctaaagtccagcatgtcatccattaccaggtcccacgtacctcggagatttatgtccaccgaagtggtcgaactgctcgagctaccaatgaaggcctcagtctgatgctcattgggcctgaggatgtgatcaactttaagaagatttacaaaacgctcaagaaagatgaggatatcccactgttccccgtgcagacaaaatacatggatgtggtcaaggagcgaatccgtttagctcgacagattgagaaatctgagtatcggaacttccaggcttgcctgcacaactcttggattgagcaggcagcagctgccctggagattgagctggaagaagacatgtataagggaggaaaagctgaccagcaagaagaacgtcggagacaaaagcagatgaaggttctgaagaaggagctgcgccacctgctgtcccagccactgtttacggagagccagaaaaccaagtatcccactcagtctggcaagccgcccctgcttgtgtctgccccaagtaagagcgagtctgctttgagctgtctctccaagcagaagaagaagaagacaaagaagccgaaggagccacagccggaacagccacagccaagtacaagtgcaaattaa

SEQ ID NO: 38 - DNA, 2913 bp, Homo sapiens
atgctttgctttttggatgatggagcaggaatggatccaagtgatgctgccagtgtgatccagtttgggaagtcggccaagcgaacacctgagtctactcagattgggcagtacgggaatgggttaaaatcgggctcaatgcgcattgggaaggattttatcctgttcaccaagaaggaagacaccatgacctgcctcttcctgtctcgcacgtttcatgaggaagaaggcattgatgaagtgatagtcccactgcccacctggaatgctcggacccgggaacctgtcacagacaatgtagagaaatttgccattgagacagaactcatctataagtactctccattccgcactgaggaggaagtgatgacccagtttatgaagattcctggggacagcggaacattggtgatcatcttcaatctcaaactcatggataatggagagccagaactagacataatctcaaatccaagagatatccagatggcagagacgtccccagagggcacgaagccagagcggcgctcgttccgtgcctatgccgctgtgctctatattgatccccggatgaggatcttcatccatgggcacaaggtgcagaccaagaggctctcctgctgcctgtacaagcccaggatgtacaagtacacgtcaagccgtttcaagacccgtgcggagcaggaggtgaagaaagcagagcacgtagcaaggattgctgaagagaaggcgcgggaggcagagagcaaagctcggacattagaagtacgcctaggtggagacctcacgcgggactccagggtgatgttgcgacaggtccagaacagagccatcactctgcgcagagaagccgatgtcaagaagaggatcaaggaggccaagcagcgagcacttaaagaacctaaggaactgaattttgtttttggtgtcaacattgaacaccgggatctggatggcatgttcatctacaactgtagccgactgatcaaaatgtatgagaaagtgggcccacagctggaagggggcatggcatgtggcggggttgttggggttgttgatgtgccctacctggtcctggagcctacacacaacaaacaggactttgctgatgccaaggagtaccggcacctgctccgagcaatgggggagcacctggcgcagtattggaaggatattgccatcgcccagaggggaatcatcaagttctgggatgagtttggctacctctctgccaactggaaccagcccccatccagtgagctgcgttacaaacgccggagagctatggaaatccccaccaccatccagtgcgatttgtgtctgaaatggagaaccctccccttccagctgagttctgtggaaaaagattaccctgacacctgggtttgctccatgaaccctgatcctgaacaggaccggtgtgaggcttctgaacaaaagcagaaggttcccctgggaacattcagaaaggacatgaagacgcaggaagagaagcagaaacaactgacagagaaaattcgccagcagcaggagaagctggaggcccttcagaaaaccacacccatccgctcccaagcagacctgaagaaattgcccttggaagtgaccaccagaccttccactgaggaacctgtgcgtagacctcagcgtcctcggtcgccccctttacctgctgtgatcaggaacgcccccagcagacccccttctttgccaactcctagaccagccagccagccccgaaaggctcctgtcatcagcagtaccccaaagctccctgctttggcagcccgggaggaggccagcacatctaggctgctccagccacctgaggcaccccgaaagcctgccaacactctcgtcaagactgcatcccgacctgcccctctggtgcagcaactgtcaccatctttactgcccaactccaagagccctcgggaggttccttctcccaaagtcatcaagactccagtggtgaagaagacagagtcacccatcaaactctccccggctacccctagtcggaagcggagtgtcgcagtttctgatgaggaagaagttgaggaggaagctgagaggaggaaggagaggtgcaagcggggcagatttgttgtgaaggaggaaaagaaggactcgaatgagctctcagacagtgctggggaagaggactcggctgacctcaagagagctcagaaagataaagggctgcacgtggaggtgcgtgtgaacagggagtggtacacgggccgtgtcacagccgtggaggtgggcaagcatgtggtgcggtggaaggtgaagtttgactacgtgcccacagacacgacaccaagagaccgctgggtggagaaaggcagtgaggatgtgcggctgatgaaacccccttctccggaacatcagagccttgatacacaacaggagggcggggaggaggaggtgggccctgtggcccagcaggccatagctgtcgcagagccctccacttccgaatgcctccgcattgagcctgacaccactgccctgagcaccaatcacgagaccatcgacctgcttgtccagatcctccggaattgtttacggtacttcctgcctccaagtttccccatctccaagaagcagctgagtgctatgaattcagatgagctaatatcttttcctctgaaggagtacttcaagcaatatgaagtagggctccaaaacctgtgcaattcctaccagagccgtgctgactcccgggccaaggcctccgaggaaagcctgcgcacctccgagaggaagctccgcgagacggaggagaagctgcagaagctgaggaccaacatcgtggcactcctgcaaaaggtgcaggaggacatagacatcaacacagatgatgagctggacgcctacattgaggacctcatcaccaagggggactga

SEQ ID NO: 39 - DNA, 555 bp, Homo sapiens
atggtgcggaagcttaagttccacgagcagaagctgctgaagcaggtggacttcctgaactgggaggtcaccgaccacaacctgcacgagctgcgcgtgctgcggcgttaccggctgcagcggcgggaggactacacgcgctacaaccagctgagccgtgccgtgcgtgagctggcgcggcgcctgcgcgacctgcccgaacgcgaccagttccgcgtgcgcgcttcggccgcgctgctggacaagctgtatgctctcggcttggtgcccacgcgcggttcgctggagctctgcgacttcgtcacggcctcgtccttctgccgccgccgcctccccaccgtgctcctcaagctgcgcatggcgcagcaccttcaggctgccgtggcctttgtggagcaagggcacgtacgcgtgggccctgacgtggttaccgaccccgccttccttgtcacgcgcagcatggaggactttgtcacttgggtggactcgtccaagatcaagcggcacgtgctagagtacaatgaggagcgcgatgacttcgatctggaagcctag

SEQ ID NO: 40 - DNA, 1968 bp, Homo sapiens
atggtggcaccaaagagtcacacagatgactgggctcctgggcctttctccagtaagccacagaggagtcagctgcaaatattctcttctgttctacagacctctctcctcttcctgctcatgggactaagagcctctggaaaggactcagccccaacagtggtgtcagggatcctagggggttccgtgactctccccctaaacatctcagtagacacagagattgagaacgtcatctggattggtcccaaaaatgctcttgctttcgcacgtcccaaagaaaatgtaaccattatggtcaaaagctacctgggccgactagacatcaccaagtggagttactccctgtgcatcagcaatctgactctgaatgatgcaggatcctacaaagcccagataaaccaaaggaattttgaagtcaccactgaggaggaattcaccctgttcgtctatgagcagctgcaggagccccaagtcaccatgaagtctgtgaaggtgtctgagaacttctcctgtaacatcactctaatgtgctccgtgaagggggcagagaaaagtgttctgtacagctggaccccaagggaaccccatgcttctgagtccaatggaggctccattcttaccgtctcccgaacaccatgtgacccagacctgccatacatctgcacagcccagaaccccgtcagccagagaagctccctccctgtccatgttgggcagttctgtacagatccaggagcctccagaggaggaacaacgggggagactgtggtaggggtcctgggagagccagtcaccctgccacttgcactcccagcctgccgggacacagagaaggttgtctggttgtttaacacatccatcattagcaaagagagggaagaagcagcaacggcagatccactcattaaatccagggatccttacaagaacagggtgtgggtctccagccaggactgctccctgaagatcagccagctgaagatagaggacgccggcccctaccatgcctacgtgtgctcagaggcctccagcgtcaccagcatgacacatgtcaccctgctcatctaccgcaggctgaggaagcccaaaatcacgtggagcctcaggcacagtgaggatggcatctgcaggatcagcctgacctgctccgtggaggacgggggaaacactgtcatgtacacatggaccccgctgcagaaggaagctgttgtgtcccaaggggaatcacacctcaatgtctcatggagaagcagtgaaaatcaccccaacctcacatgcacagccagcaaccctgtcagcaggagttcccaccagtttctttctgagaacatctgttcaggacctgagagaaacacaaagctttggattgggttgttcctgatggtttgccttctgtgcgttgggatcttcagctggtgcatttggaagcgaaaaggacggtgttcagtcccagccttctgttccagccaagctgaggccccagcggatacaccagaacccacagctggccacacgctatactctgtgctctcccaaggatatgagaagctggacactcccctcaggcctgccaggcaacagcctacacccacctcagacagcagctctgacagcaacctcacaactgaggaggatgaggacaggcctgaggtgcacaagcccatcagtggaagatatgaggtatttgaccaggtcactcaggagggcgctggacatgacccagcccctgagggccaagcagactatgatcccgtcactccatatgtcacggaagttgagtctgtggttggagagaacaccatgtatgcacaagtgttcaacttacagggaaagaccccagtttctcagaaggaagagagctcagccacaatctactgctccatacggaaacctcaggtggtgccaccaccacaacagaatgatcttgagattcctgaaagtcctacctatgaaaatttcacctga

SEQ ID NO: 41 - DNA, 1167 bp, Homo sapiens
atgcgcgcccgccgggggctgctgcggctgccgcgccgctcgctgctcgccgcgctcttcttcttttctctctcgtcctcgctgctgtacttcgtctatgtggcgcccggcatagtgaacacctacctcttcatgatgcaagcccaaggcattctgatccgggacaacgtgagaacaatcggtgctcaggtttatgagcaggtgcttcggagtgcttatgccaagaggaacagcagtgtaaatgactcagattatcctcttgacttgaaccacagtgaaaccttcctgcaaactacaacatttcttcctgaagacttcacctactttgcaaaccatacctgccctgaaagactcccttccatgaagggcccaatagacataaacatgagtgaaattggaatggattacattcatgaactcttctccaaagacccaaccatcaagctcggaggtcactggaagccttctgattgcatgcctcggtggaaggtggcgatccttatccccttccggaaccgccacgagcacctcccagtcctgttcagacacctgcttcccatgctccagcgccagcgcttgcagtttgcattttatgtggttgaacaagttggtacccaaccctttaatcgagccatgcttttcaacgttggctttcaagaggcaatgaaagacttggattgggactgtttgatttttcatgatgtagatcacataccggaaagtgatcgcaactattatggatgtggacagatgccgaggcattttgcaaccaaattggataagtatatgtatctgcttccttataccgagttctttggcggagtgagtggcttaacagtggaacaatttcggaaaatcaatggctttcctaatgctttctggggttggggtggagaagatgacgacctctggaacagagtacagaatgcaggctattctgtgagccggccagagggtgacacaggaaagtacaagtccattcctcatcaccatcgaggagaagtccagtttcttggaaggtatgctctgctgaggaagtcaaaagaacggcaagggctggatggcctcaacaacctgaactactttgcaaacatcacatacgacgccttgtataaaaacataactgtcaacctgacacccgagctggctcaggtgaacgagtactga

SEQ ID NO: 42 - DNA, 2472 bp, Homo sapiens
atgtcccgccgcaaacagggcaacccgcagcacttgtcccagagggagctcatcaccccagaggctgaccatgtggaggccgccatcctcgaagaagacgagggtctggagatagaggagccaagtggcctggggctgatggtgggtggccccgaccctgacctgctcacctgtggccagtgtcaaatgaacttccccttgggggacatcctggtttttatagagcacaaaaggaagcagtgtggcggcagcttgggtgcctgctatgacaaggccctggacaaggacagcccgccaccctcctcacgctccgagctcaggaaagtgtccgagccggtggagatcgggatccaagtcacccccgacgaagatgaccacctgctctcacccacgaaaggcatctgtcccaagcaggagaacattgcaggtaaagatgagccttccagctacatttgcacaacatgcaagcagcccttcaacagcgcgtggttcctgctgcagcacgcgcagaacacgcacggcttccgcatctacctggagcccgggccggccagcagctcgctcacgccgcggctcaccatcccgccgccgctcgggccggaggccgtggcgcagtccccgctcatgaatttcctgggcgacagcaaccccttcaacctgctgcgcatgacgggccccatcctgcgggaccacccgggcttcggcgagggccgcctgccgggcacgccgcctctcttcagtcccccgccgcgccaccacctggacccgcaccgcctcagtgccgaggagatggggctcgtcgcccagcaccccagtgccttcgaccgagtcatgcgcctgaaccccatggccatcgactcgcccgccatggacttctcgcggcggctccgcgagctggcgggcaacagctccacgccgccgcccgtgtccccgggccgcggcaaccctatgcaccggctcctgaaccccttccagcccagccccaagtccccgttcctgagcacgccgccgctgccgcccatgccccctggcggcacgccgcccccgcagccgccagccaagagcaagtcgtgcgagttctgcggcaagaccttcaagttccagagcaatctcatcgtgcaccggcgcagtcacacgggcgagaagccctacaagtgccagctgtgcgaccacgcgtgctcgcaggccagcaagctcaagcgccacatgaagacgcacatgcacaaggccggctcgctggccggccgctccgacgacgggctctcggccgccagctcccccgagcccggcaccagcgagctggcgggcgagggcctcaaggcggccgacggtgacttccgccaccacgagagcgacccgtcgctgggccacgagccggaggaggaggacgaggaggaggaggaggaggaggaggagctgctactggagaacgagagccggcccgagtcgagcttcagcatggactcggagctgagccgcaaccgcgagaacggcggtggtggggtgcccggggtcccgggcgcggggggcggcgcggccaaggcgctggctgacgagaaggcgctggtgctgggcaaggtcatggagaacgtgggcctaggcgcactgccgcagtacggcgagctcctggccgacaagcagaagcgcggcgccttcctgaagcgtgcggcgggcggcggggacgcgggcgacgacgacgacgcgggcggctgcggggacgcgggcgcgggcggcgcggtcaacgggcgcgggggcggcttcgcgccaggcaccgagcccttccccgggctcttcccgcgcaagcccgcgccgctgcccagccccgggctcaacagcgccgccaagcgcatcaaggtggagaaggacctggagctgccgcccgccgcgctcatcccgtccgagaacgtgtactcgcagtggctggtgggctacgcggcgtcgcggcacttcatgaaggaccccttcctgggcttcacggacgcacgacagtcgcccttcgccacgtcgtccgagcactcgtccgagaacggcagcctgcgcttctccacgccgcccggggacctgctggacggcggcctctcgggccgcagcggcacggccagcggaggcagcaccccgcacctgggcggcccgggccccgggcggcccagctccaaggagggccgccgcagcgacacgtgcgagtactgcggcaaggtgttcaagaactgcagcaacttgacggtgcaccggcggagccacaccggcgagcggccttacaagtgcgagctgtgcaactacgcgtgcgcgcagagcagcaagctcacgcgccacatgaagacgcacgggcagatcggcaaggaggtgtaccgctgcgacatctgccagatgcccttcagcgtctacagcaccctggagaaacacatgaaaaagtggcacggcgagcacttgctgactaacgacgtcaaaatcgagcaggccgagaggagctaa

SEQ ID NO: 43 - DNA, 2358 bp, Homo sapiens
atgccgaaggggaggcagaaagtgccacacttggatgcccccctgggcctgcccacctgcctctggctggaattagccgggctcttcttactggttccctgggtcatgggcctggcagggacaggtgggcctgatggccagggcacaggggggccgagctgggctgtgcacctggaaagcctggaaggtgacggggaggaagagactctggagcagcaggcggatgccttggcccaggcagcagggctggtgaatgctggacgcatcggagagcttcaggggcactacctctttgtccagcctgctgggcacaggccggccctggaggtggaggccatccggcagcaggtggaggctgtgttggctgggcatgaagctgtgcgctggcactcagagcagaggctgctaaggcgggccaagcgcagcgtccacttcaacgaccccaagtacccgcagcaatggcacctgaataaccgacggagcccgggcagggacatcaacgtgacgggtgtgtgggaacgcaatgtgactgggcgaggggtgacggtggtggtagtggatgacggagtggaacacaccatccaggacattgcacccaactatagccctgagggtagctatgacctcaactctaatgaccctgaccccatgccccacccggatgtggagaatggcaaccaccatggcacgcgatgtgcaggagagatcgcggctgtgcccaacaacagcttctgtgccgtgggcgtggcctacgggagccgcatcgcaggtatccgggtactggatggacctctcacagacagcatggaggcagtggcgttcaacaagcactatcagatcaatgacatctacagctgcagctggggaccagatgacgatgggaagacagtggatggcccccatcagcttggaaaggctgccttacaacatggggtgattgctggtcgccagggctttgggagcatctttgtggtagccagtggcaacggaggccaacacaacgacaactgcaactacgatggctacgccaactccatctacaccgtcaccataggagctgtggatgaggagggacgcatgcctttctatgcagaagaatgtgcctccatgctggcagtcaccttcagtggtggggacaagatgcttcggagcattgtgaccactgactgggaccttcagaagggcactggctgcactgagggccacacagggacctcagctgcagcgcctctggcagctggcatgatagccttaatgctgcaggtgcggccctgcctcacgtggcgtgacgtccagcacatcattgtcttcacagccacccggtatgaggatcgccgtgcagagtgggtcaccaacgaggcaggcttcagccatagccaccagcacggtttcggcctcctcaacgcctggaggctcgtgaatgcagccaagatctggacatctgtcccttacttagcatcctacgtcagtcccgtgttaaaagaaaacaaggcgattccgcagtccccccgttccctggaggtcctgtggaatgtcagcaggatggacctggagatgtcagggctgaagaccctggagcatgtggcagtgacagtctccatcactcacccacggcgcggcagcttggagctgaagctgttctgccccagtggcatgatgtccctcatcggcgccccccgcagcatggactcggatcccaacggcttcaatgactggaccttctccactgtgcgatgctggggggagagagcccgagggacctacaggcttgtcatcagggatgtcggggatgagtcattccaggtcggcatcctccggcaatggcagctgaccctatatggctctgtgtggagtgcagtagacatcagggacagacaaaggctgttagagagtgccatgagtggaaaatacctgcacgatgacttcgccctgccctgcccaccggggctgaaaattcctgaggaagatggttacaccatcacccccaacaccctcaagaccctggtgctggtaggctgtttcaccgtcttctggactgtttactacatgctggaagtatatttgagccagaggaatgtggcttccaatcaagtttgtaggagtggaccctgccactggccccatcggagccggaaagccaaggaggaagggacagagctagaatcagtgccactttgcagcagcaaggatccagacgaagtggaaacagagagcaggggccctcccaccacctctgacctccttgccccagacctgctggagcaaggggactggagcctgtcccagaacaagagcgccctggactgccctcatcagcacctagacgtaccgcacgggaaggaggagcagatctgctga

SEQ ID NO: 44 - DNA, 1122 bp, Homo sapiens
atgctcaagagaaagccatccaatgtttcagagaaggagaaacatcaaaaaccaaagcgaagcagcagttttgggaatttcgatcgttttcggaataattctttatcaaaaccagatgattcaactgaggcacatgaaggagatcccacaaatggaagtggagaacaaagtaaaacttcaaataatggaggcggtttgggtaaaaaaatgagagctatttcatggacaatgaagaaaaaagtgggtaaaaagtacatcaaagccctttctgaggaaaaggatgaggaagatggagagaatgcccacccatatagaaacagtgaccctgtgattgggacccacacagagaaggtgtccctcaaagccagtgactccatggatagtctctacagtggacagagctcatcaagtggcataacaagctgttcagatggtacaagtaaccgggacagctttcgactggatgacgatggcccctattcaggaccattctgtggccgtgccagagtgcatacggatttcacgccaagtccctatgacactgactccctcaaaatcaagaaaggagacatcatagacattatttgcaaaacaccaatggggatgtggacaggaatgttgaacaataaagtgggaaacttcaaattcatttatgtggatgtcatctcagaagaggaagcagcccccaagaaaataaaggcaaaccgaaggagtaacagcaaaaaatccaagactctgcaggagttcctagagaggattcatctgcaggaatacacctcaacacttttgctcaatggttatgagactctagaagatttaaaagatataaaagagagtcacctcattgaattaaatattgaaaacccagatgacagaagaaggttactatcagctgctgaaaacttccttgaagaagaaattattcaagagcaagaaaatgaacctgagcccctatccttgagctcagacatctccttaaataagtcacagttagatgactgcccaagggactctggttgctatatctcatcaggaaattcagataatggcaaagaggatctggagtctgaaaatctgtctgacatggtacataagattattatcacagagccaagtgactga

SEQ ID NO: 45 - DNA, 2948 bp, Homo sapiens
acaaaaaagacatccagctctaaggagctcaaaacatcctgaggacagtgcctggaggtgagaaggaagcccccggcctggtccataccccaccaccaacttgcataatggggggtgatgtcacccaccctccactcccctcaaaggagcagctgctctggtggtctctcccaggctctgggggcggacccatgggaggggctgtttttgtacaaagctgtaacattgtggggacaggggactgctggggccaacgtcctgactttcggggccggcagcaggctgaccgtgctgggtgagttttcgcgggaccacccgggcggcgggattcaggtggaaggcggcggctgcttcgcggcacccggtccggccctgtgctgggagacctgggctgggtccccagggtgggcaggagctcggggagccttagaggtttgcatgcgggattgcacctccgtgctcctacgagcagtacttcgggccgggcaccaggctcacggtcacaggtgagattcgggcgtctccccaccttccagcccctcggtccccggagtcggagggtggaccggagctggaggagctgggtgtccggggtcagctctgcaaggtcacctccccgctcctgggaaaagactggggaagagggagggggtggggaggtgctcagagtccggaaagctgagcagagggcgaggccacttttaatcttttttctggggtgtttagagagaaggtgaacgatggaggagaggatttgttaggactctgggagaggcgagactggagaggacgaagggaaatcctggtttggggaatgggtaggagtgggggtaactgctattcgtaggcaaaaagagctgagcaggctgggaacagcgcgggtgggcaagggtcagcactgcgggcaggcgggtgggtgttagggggcagaaatcctgcagccgagggtgcagtagaacacagaagaaaaagcctgccaaacaaaagtggaacagagaagccaaaaagggagatgaacatgagtcagtgaagaaaagaatgaaagtttactgtttagcagtgtggatctctaatccgacttaaaactccttgttcccgattcctattcctcctaagccagagatccctgggtccagggtgagggcacggcattcatgcttacccacgggctggtcaacaaagaggtgctgacctgagagtagggcacataacctcagccactggggtacacttaccacccccgcccccgtgtagctccctcccctatcctgaaatctcccttagcacactaagtattctaggttaaacagcccagatgttcagggagttcattcgccacaaacacacattaaaatgcagacaatttgcctgtgagatgaggaaaattctctggaagatttaggccctgagagctgaaaagggaccctaaacattacctggtgacaactgccctgaggccagagaagagaactcacaatattggcatattaaccggtaccatttgtagttaggctgtcattaatctgggtgtaatggggctcagctacagtgaagcgtatccagaggaaatgtggggttcctgcagtcagctggggcaccgaaaagacccagaatttagaaccagataaaggctgagttcgaacctctggttcttttgtgatgtggtgaccttgggcaaattaatgtgtgaacctcagtttcctcaactataaaatgtaatgaacaatacctaccacttactattgctgtgaggaagaaaagagagtcaacatgtaccgtgtacagattattgatgtaattcaatggttcttttccccatcctcctaggaggtcactggggagacagggggcagggtcagcccagtgccaaaggatgggcaggatctgaagtgtggaaatggagtaaggctgtgtctgtgtcagaggtgggttgggaagatgtgagacaaacatcacaattttgcctaaggtgaatccaacccacaagtagagcacaggccaacagcagctcactagtacacatacttacaccagcagctcactagtacacacacttacaccagacgctcactggtacacactcacaccagaagctcattagaacacacacaccgtcagcttgctagtacacacacttacaccagaagctcactagtatacacttacaccagaagctcactagtacacacacttactccagaagctcactagtacacacacttacacccacagagacaagccccacaccacacggactcacaaatgcagaagaagagttgaccctgccctcatgtacagatagtatgctggtgtgtagtgagaggcggctagtgttcgccacgcctgttgcatcaataactattccacagaacagcatacatggtcaaggaatatttttaatttttacaatgaggactgagtgtttgctaaatgaagaaatcaaaggagtacattctggagggctggtagactcccagagccagggtttttgagatgagagtgaaaataagcaggctgagagcagaaagaaagaaagttctgcagatagaagttaggatattaccacttcggccccagcccagccagtaaatgtttagaagcatagtagtaattagcaggtaggagttgtggggaggaaaggaaactgacatgatgggaagcaggaccagctacaaaatcttcaggaccagctcagaatgaaaatgccggggctcgtgttaaatcttaggatttcaacatggtgacagcagagcactaaaccaagcagggggcccttctagcaggaggccccatggggacctaggaaggaggtcacatccatacaaatgtaaagaaatgtcagagtaaatttcctccattgtccaggagattcggaataggttctcctaagactgatatttcttcattttaatagagttgctcagaaatgaaaaacaatcaatgggaag

SEQ ID NO: 46 - DNA, 2706 bp, Homo sapiens
atggaggcagcccgcccctccggctcctggaacggagccctctgccggctgctcctgctgaccctcgcgatcttaatatttgccagtgatgcctgcaaaaatgtgacattacatgttccctccaaactagatgccgagaaacttgttggtagagttaacctgaaagagtgctttacagctgcaaatctaattcattcaagtgatcctgacttccaaattttggaggatggttcagtctatacaacaaatactattctattgtcctcggagaagagaagttttaccatattactttccaacactgagaaccaagaaaagaagaaaatatttgtctttttggagcatcaaacaaaggtcctaaagaaaagacatactaaagaaaaagttctaaggcgcgccaagagaagatgggctccaattccttgttcgatgctagaaaactccttgggtccttttccacttttccttcaacaggttcaatctgacacggcccaaaactataccatatactattccataagaggtcctggagttgaccaagaacctcggaatttattttatgtggagagagacactggaaacttgtattgtactcgtcctgtagatcgtgagcagtatgaatcttttgagataattgcctttgcaacaactccagatgggtatactccagaacttccactgcccctaataatcaaaatagaggatgaaaatgataactacccaatttttacagaagaaacttatacttttacaatttttgaaaattgcagagtgggcactactgtgggacaagtgtgtgctactgacaaagatgagcctgacacgatgcacacacgcctgaagtactccatcattgggcaggtgccaccatcacccaccctattttctatgcatccaactacaggcgtgatcaccacaacatcatctcagctagacagagagttaattgacaagtaccagttgaaaataaaagtacaagacatggatggtcagtattttggtctacagacaacttcaacttgtatcattaacattgatgatgtaaatgaccacttgccaacatttactcgtacttcttatgtgacatcagtggaagaaaatacagttgatgtggaaatcttacgagttactgttgaggataaggacttagtgaatactgctaactggagagctaattataccattttaaagggcaatgaaaatggcaattttaaaattgtaacagatgccaaaaccaatgaaggagttctttgtgtagttaagcctttgaattatgaagaaaagcaacagatgatcttgcaaattggtgtagttaatgaagctccattttccagagaggctagtccaagatcagccatgagcacagcaacagttactgttaatgtagaagatcaggatgagggccctgagtgtaaccctccaatacagactgttcgcatgaaagaaaatgcagaagtgggaacaacaagcaatggatataaagcatatgacccagaaacaagaagtagcagtggcataaggtataagaaattaactgatccaacagggtgggtcaccattgatgaaaatacaggatcaatcaaagttttcagaagcctggatagagaggcagagaccatcaaaaatggcatatataatattacagtccttgcatcagaccaaggagggagaacatgtacggggacactgggcattatacttcaagacgtgaatgataacagcccattcatacctaaaaagacagtgatcatctgcaaacccaccatgtcatctgcggagattgttgcggttgatcctgatgagcctatccatggcccaccctttgactttagtctggagagttctacttcagaagtacagagaatgtggagactgaaagcaattaatgatacagcagcacgtctttcctatcagaatgatcctccatttggctcatatgtagtacctataacagtgagagatagacttggcatgtctagtgtcacttcattggatgttacactgtgtgactgcattaccgaaaatgactgcacacatcgtgtagatccaaggattggcggtggaggagtacaacttggaaagtgggccatccttgcaatattgttgggcatagcattgctcttttgcatcctgtttacgctggtctgtggggcttctgggacgtctaaacaaccaaaagtaattcctgatgatttagcccagcagaacctaattgtatcaaacacagaagctcctggagatgacaaagtgtattctgcgaatggcttcacaacccaaactgtgggcgcttctgctcagggagtttgtggcaccgtgggatcaggaatcaaaaacggaggtcaggagaccatcgaaatggtgaaaggaggacaccagacctcggaatcctgccggggggctggccaccatcacaccctggactcctgcaggggaggacacacggaggtggacaactgcagatacacttactcggagtggcacagttttactcagccccgtcttggtgaaaaagtgtatctgtgtaatcaagatgaaaatcacaagcatgcccaagactatgtcctgacatataactatgaaggaagaggatcggtggctgggtctgtaggttgttgcagtgaacgacaagaagaagatgggcttgaatttttggataatttggagcccaaatttaggacactagcagaagcatgcatgaagagatga

SEQ ID NO: 47 - DNA, 1779 bp, Homo sapiens
atgtcggattctggaagttacggtcagtctgggggtgagcagcaaagttattctacctatggaaatccaggcagccaaggctatggacaagcatcacaaagctattctggctatgggcaaacgactgattcctcttatggacagaactacagcggttactccagttatggacaaagtcagtcaggttattcacagtcctatggtggttatgagaatcaaaagcagagctcatatagccagcaaccatataataaccagggacagcagcaaaacatggaatcatcaggaagccaaggtggaagagcaccttcctatgaccagccagactatggtcaacaagattcatatgaccagcagtcaggctatgatcaacatcaaggctcatatgatgagcagtcaaattatgatcagcagcatgattcctatagtcaaaaccagcagtcctatcattcacaaagggaaaactacagccaccacacacaagatgaccgtcgtgatgtgagtaggtatggagaagataatagaggatatggcgggtcacagggaggaggtagagggcgtgggggatatgacaaggatggaagaggtcctatgacaggatcaagtggtggtgaccgcggtggcttcaaaaattttggtggtcacagggattatggacccagaacagatgctgattcagaatctgataattcagataacaacacaatctttgtgcaaggacttggggagggtgtgtctacagatcaagttggggagttctttaaacaaataggaattatcaagacaaataagaagaccggaaaaccaatgataaatctttatacagacaaggacacaggaaagccaaagggggaggcaacagtgtcatttgatgaccctccttcagctaaggcagccattgactggtttgatggaaaagaattccatggcaacatcattaaagtgtcctttgccactagaagacctgaattcatgagaggaggtggaagtggaggtgggcggcgaggccgtggaggatatagaggtcgtggaggctttcaagggagaggtggagaccccaaaagtggggattgggtttgccctaatccgtcatgcggaaatatgaactttgctcgaaggaattcctgcaatcagtgcaatgagcctagaccagaggactctcgtccctcaggaggagatttccgggggagaggctacggtggagagaggggctacagaggtcgtgggggcagaggtggagaccgaggcggctatggtggagacagaagtgggggtggctatggtggagacagaagcagcggtggtggctacagcggagatagaagtgggggcggctatggtggagacagaagtgggggtggctatggtggggacagaggcggcggctatggtggggacagaggaggcggctatggaggagaccgaggaggtggctatggaggagatcgaggtggctatggaggagaccgaggtggaggctatggtggagaccgaggaggctatggaggagatcgaggaggttacggaggagatcgaggaggttatggaggagatcgaggaggctatggaggagacagaagccgggggggctatggaggagaccgtggtggtggcagtggctacggtggagaccgaagtggaggctatggaggagacaggagtggtggcggctatggaggagaccgaggtgggggctacggaggagaccgaggtggctatggaggcaaaatgggaggaagaaacgactacagaaatgatcagcgcaaccgaccatactga

SEQ ID NO: 48 - DNA, 4621 bp, Homo sapiens
atgcaccagaccctctgcctgaaccccgagagcctgaaaatgtctgcgtgcagtgactttgtggagcacatctggaaacccgggtcctgcaagaactgcttctgcctgcggagcgaccaccagctggtggccggccctccccagcccagagcgggcagcctgccccctccaccgcgcctgcctcccaggcctgagaactgccgcctggaagatgaaggtgtgaacagctcaccttactccaagcccacaattgccgtgaagcccaccatgatgagctccgaggcctctgatgtgtggacagaggccaacctgagtgccgaagtctcgcaggtcatctggagacgagcccctggcaagctccccctcccgaagcaggaggatgcccccgtcgtctacctgggcagcttccgaggtgtacagaagcctgctggtccctctacctcccctgatggcaattctcgctgtcccccagcttacaccatggtcggcctgcacaaccttgagccccgcggcgagaggaacattgccttccacccggtgagcttcccggaggagaaggctgtgcacaaagaaaaaccctcatttccttaccaagaccggccctccacccaggagagcttccgccagaaactggctgcctttgctgggaccacatctggctgtcaccagggccctgggcccctgcgggaatccctgccctcggaggatgacagtgatcaaaggtgctcgccctccggggacagcgagggtggagagtactgctccatcctggactgctgccctgggagccctgttgccaaggctgcctcccagactgcaggttcccggggcaggcatggtggcagggactgctcacccacgtgctgggagcaggggaagtgttccgggcccgcagagcaggagaagcggggcccgagcttccccaaggagtgctgtagccagggccccactgcccacccatcctgcctgggccccaagaaactgtccctcacctcggaggctgccatttcttccgacggcctctcttgtggcagcggcagcggcagcggcgccagtagccccttcgtcccccacctcgagagtgattactgctccctcatgaaggaacctgccccagagaagcagcaggaccctggctgcccaggggtgacccctagcagatgccttgggctgacgggggagccccagcccccggcccacccccgggaggctacacagcctgaacccatctatgctgagagcaccaagaggaagaaggcagctccggtgccttccaagtcacaggccaagatagaacatgcagctgctgcccagggccaaggccaggtatgcacaggtaatgcctgggcccagaaagcagcatctggctggggccgggacagcccagacccaactccccaggtgtcagccaccatcacagtcatggcggcccacccggaagaggaccatcggacgatctacctgagcagccctgactctgcagtgggggtgcagtggccacgagggcctgtgagccagaactccgaggtaggtgaagaggagacttcggctgggcaggggctgagctccagggaaagccatgctcacagtgccagcgagagcaagcccaaggagaggcccgccattccccccaagttgtccaagagtagccctgtagggtccccggtgtcaccgtctgctggagggcccccagtgtcaccgctggctgaccttagtgatgggagctctggcggcagcagcattgggccccagcctccatcccaaggtcctgctgaccccgctccttcctgccggaccaacggtgtcgctatcagtgacccatccaggtgtccccagcctgccgcctcgtcagcctcggaacagaggcggcccaggttccaggcaggcacctggagtcgtcagtgccggatagaggaagaagaggaggtggagcaggaattgctgagtcacagctggggaagagagaccaaaaatggccccacggaccattcaaactccacgacctggcaccgtctccaccccacagatggctcctctgggcagaacagcaaagttgggaccgggatgagcaaatccgcctcttttgcctttgagttccccaaggacagaagtgggattgagacattctcacctcctcctccgcctccaaagtcgcggcaccttctaaaaatgaacaagagcagctctgatttggaaaaagtgagccagggctctgcagaaagcctcagcccatccttcaggggtgtccacgtcagcttcaccaccggctccacggacagcctggcctcagactctaggacctgcagcgatggaggtccctcgtctgagctggctcactcgcccaccaacagcgggaagaagctctttgctcccgttccgtttccttcaggctccactgaggacgtgtcccccagtggcccccagcagccccctccactcccccagaaaaagatagtgagccgggcagcctcttcaccggatggcttcttctggacccaaggctcccccaagcccggaacagcaagccccaagctgaacctaagccactcggaaaccaacgtccacgacgaatctcactttagctattcgttgagccccgggaaccgccaccatcctgtcttctcctcttccgatcctctggagaaagctttcaaaggcagtggccactggcttccggcagcagggctggcgggcaacagaggcggctgcgggagccctggcctccagtgcaaaggggccccctccgcctcatcctcccagctgagcgtgtccagtcaagcctccaccgggagcacccagcttcagctgcacggtctcctgagcaacatcagcagcaaggagggcacctatgccaagctggggggactctacacccagtccctggcccgccttgtagccaaatgtgaggacctcttcatgggcggccagaaaaaggagctccacttcaatgagaataactggtcgctcttcaagctgacttgtaacaagccctgctgtgactcgggggatgccatttattactgtgccacctgctctgaggaccccggcagcacctatgctgtgaaaatctgcaaagcccctgagcccaaaacagtctcctactgcagcccgtccgtgcccgtgcactttaacatccagcaggactgcggccacttcgtcgcctcggtgccgtccagcatgctcagctcccccgacgcgcccaaggaccctgtgcctgccctgcccacacacccccctgcccaggagcaggactgcgtggtggtcatcacccgagaggtgccacatcagaccgcctccgacttcgtgcgggactcggcggccagccaccaggcggagcccgaggcgtacgagcggcgcgtgtgcttcctgcttctgcaactctgcaacgggctggagcacctgaaggagcacgggatcatccaccgggacctgtgcctggagaacctgctgctggtgcactgcaccctccaggccggccccgggcccgcccccgccccggctcccgcccccgccgccgccgcgcctccctgctcctctgccgccccgcctgctggtggcactctcagccccgcagccggccccgcctccccggaagggccccgggagaagcagctgccccggctcatcatcagcaactttttgaaggccaagcagaagccgggcggcaccccaaacctgcagcagaagaagagccaggcccggctggcccccgagatcgtgtctgcttcccagtaccgcaagttcgatgagttccagacaggcatcctcatctacgagctgctgcaccaacccaacccgttcgaggtgcgcgcccagctgcgggagagagactaccggcaggaggacctgccgccgctgcccgcgctgtccctctactcacccggcctgcagcagctggcacatctgctactggaggccgaccccatcaagcgtatccgcatcggcgaggccaagcgcgtgctgcagtgcctgctgtgggggcctcggcgcgagctggtgcagcagccgggcacctcggaggaggcgctgtgcggcacgctgcacaactggatcgacatgaagcgggccctgatgatgatgaagtttgcggagaaggcggtggatcgcaggcggggcgtggagctggaggactggctttgctgccagtacctggcgtctgcggagcccggggccctcttacagtcgctgaagctcctgcagcttctgtgagccaagccccagcctgcaccgtcgctgccccttccctgcctaaccctttcctgtctcgccttggaagcacccatgtctccctgggaaatggtacagatgactgggatacctggatgtaaaatatataaatatatatatagaaaatacatataccatatataaatatgaaagactaaggatgctgttgcccgtccacactcgtctcctctctgcactaagtcctccctgttttcttctgtaattatacacatttccagttccatgcaacgtcctgaggacagttctgtgaactgaatgcagcctggacactggcctcaataccttgtttaggatttcttcacccttttgtcaaattgttatttaaagaaaaaaaaaaaagaagaaaattccattaaaattttttttggttgag

SEQ ID NO: 49 - DNA, 2205 bp, Homo sapiens
atgcttctgtggctgctgctgctgatcctgactcctggaagagaacaatcaggggtggccccaaaagctgtacttctcctcaatcctccatggtccacagccttcaaaggagaaaaagtggctctcatatgcagcagcatatcacattccctagcccagggagacacatattggtatcacgatgagaagttgttgaaaataaaacatgacaagatccaaattacagagcctggaaattaccaatgtaagacccgaggatcctccctcagtgatgccgtgcatgtggaattttcacctgactggctgatcctgcaggctttacatcctgtctttgaaggagacaatgtcattctgagatgtcaggggaaagacaacaaaaacactcatcaaaaggtttactacaaggatggaaaacagcttcctaatagttataatttagagaagatcacagtgaattcagtctccagggataatagcaaatatcattgtactgcttataggaagttttacatacttgacattgaagtaacttcaaaacccctaaatatccaagttcaagagctgtttctacatcctgtgctgagagccagctcttccacgcccatagaggggagtcccatgaccctgacctgtgagacccagctctctccacagaggccagatgtccagctgcaattctccctcttcagagatagccagaccctcggattgggctggagcaggtcccccagactccagatccctgccatgtggactgaagactcagggtcttactggtgtgaggtggagacagtgactcacagcatcaaaaaaaggagcctgagatctcagatacgtgtacagagagtccctgtgtctaatgtgaatctagagatccggcccaccggagggcagctgattgaaggagaaaatatggtccttatttgctcagtagcccagggttcagggactgtcacattctcctggcacaaagaaggaagagtaagaagcctgggtagaaagacccagcgttccctgttggcagagctgcatgttctcaccgtgaaggagagtgatgcagggagatactactgtgcagctgataacgttcacagccccatcctcagcacgtggattcgagtcaccgtgagaattccggtatctcaccctgtcctcaccttcagggctcccagggcccacactgtggtgggggacctgctggagcttcactgtgagtccctgagaggctctcccccgatcctgtaccgattttatcatgaggatgtcaccctggggaacagctcagccccctctggaggaggagcctccttcaacctctctctgactgcagaacattctggaaactactcctgtgatgcagacaatggcctgggggcccagcacagtcatggagtgagtctcagggtcacagttccggtgtctcgccccgtcctcaccctcagggctcccggggcccaggctgtggtgggggacctgctggagcttcactgtgagtccctgagaggctccttcccgatcctgtactggttttatcacgaggatgacaccttggggaacatctcggcccactctggaggaggggcatccttcaacctctctctgactacagaacattctggaaactactcatgtgaggctgacaatggcctgggggcccagcacagtaaagtggtgacactcaatgttacaggaacttccaggaacagaacaggccttaccgctgcgggaatcacggggctggtgctcagcatcctcgtccttgctgctgctgctgctctgctgcattacgccagggcccgaaggaaaccaggaggactttctgccactggaacatctagtcacagtcctagtgagtgtcaggagccttcctcgtccaggccttccaggatagaccctcaagagcccactcactctaaaccactagccccaatggagctggagccaatgtacagcaatgtaaatcctggagatagcaacccgatttattcccagatctggagcatccagcatacaaaagaaaactcagctaattgtccaatgatgcatcaagagcatgaggaacttacagtcctctattcagaactgaagaagacacacccagacgactctgcaggggaggctagcagcagaggcagggcccatgaagaagatgatgaagaaaactatgagaatgtaccacgtgtattactggcctcagaccactag

SEQ ID NO: 50 - DNA, 1569 bp, Homo sapiens
atgcccaggaagaaggcggcggcggcggcctgggaggagccgagctcgggcaacggcactgcccgcgccgggcccaggaaacgcggcggcccggcgggcaggaagcgcgagcggcccgagcgctgcagtagcagcagcggcggcggcagcagcggcgacgaggacggcctggagctcgacggggcccccggcgggggcaagcgcgcggcgcggccggcgacagcaggcaaggcgggcggcgcggccgtggtcatcaccgaacccgagcacaccaaggagcgcgtcaaacttgaagggtcaaagtgcaaagggcagcttttgatttttggggcaaccaactgggacttgattggtcgaaaagaagtgcctaaacagcaagctgcttaccgcaatctcggtcagaatttgtgggggccccacagatatgggtgcctggcgggggtccgggtgcggacagtggtctcgggctcgtgtgctgcacacagcctcctcatcaccacggaagggaagctgtggagctggggtcgaaatgagaaggggcagctgggacatggtgacaccaagagagtagaagcccctagactcatcgagggtcttagccacgaagtgattgtgtctgcagcatgtgggcggaaccacaccttggccttgacggaaacgggctccgtgtttgcgtttggggaaaacaagatggggcagctgggccttggcaaccagacagacgctgttcccagccccgcgcagataatgtacaacggccagccaattaccaaaatggcctgtggggctgaattcagtatgataatggactgcaaaggaaacctctattcctttgggtgccctgaatatggtcagctgggacacaactcagatgggaagttcatcgcccgggcacagcggatagagtacgactgtgaactagttccccggcgagtggccatcttcattgagaagacgaaagatggacagattctgcctgtaccaaacgtggttgtacgagacgtggcctgtggcgctaaccacacgctggtcctggactcccagaagcgagtcttctcctggggctttggtggctatggccggctgggccacgcagagcagaaggatgagatggtcccccgcctggtgaagctgtttgacttccctgggcgtggggcttcccagatctatgctggttacacctgctcctttgctgtcagtgaagtgggtggtctgtttttctggggggccaccaacacctcccgtgaatctaccatgtacccaaaagcagtgcaggacctctgcggctggagaatccggagcctggcttgtgggaagagcagcatcattgtggccgccgatgagagcaccatcagctggggtccgtcaccgacctttggggaactgggctacggggaccacaagcccaagtcttccactgcagcccaggaggtaaagactctggatggcattttctcagagcaggtcgccatgggctactcacactccttggtgatagcaagagatgaaagtgagactgagaaagagaagatcaagaaactgccagaatacaacccccgaaccctctga

SEQ ID NO: 51 - DNA, 2268 bp, Homo sapiens
atggccagcgtccacgagagcctctacttcaatcccatgatgaccaatggggttgtgcacgccaatgtgttcggcatcaaggactgggtgacgccgtacaagatcgcggtgctggtgctgctgaacgagatgagccgcacaggcgagggcgccgtcagcctcatggagcggcggaggctcaaccagctgctcctgcccctgctgcagggcccagatattacactgtcaaaactttacaagttaattgaagagtcttgtccacagctggcaaattcagtgcagatcagaatcaaactgatggctgaaggcgagttgaaggatatggaacagttttttgatgacctttcagattctttctctggaactgaaccagaggttcacaaaacaagtgtagtaggtttgtttctgcgtcacatgatcttggcctacagtaagctttctttcagccaagtgtttaaactgtacactgcccttcagcagtacttccagaatggtgagaaaaagacagtggaggatgctgatatggaactgaccagtagagatgagggtgaaagaaaaatggaaaaagaagaacttgatgtatctgtaagagaagaggaggtatcttgcagtgggcctctgtcccaaaaacaagcagaattttttctttctcaacaggcttctttgctaaagaatgatgagactaaggccctcactccagcttccttgcagaaggaattaaacaatttgttgaaatttaatcctgattttgctgaagcgcattatctcagctacttaaacaacctccgtgtccaagatgttttcagttcaacacacagtctcctccattattttgatcgtctgattcttaccggagccgaaagcaaaagtaatggggaagagggctatggccggagcttgagatacgccgctctgaatcttgccgccctgcactgccgcttcggtcactatcaacaggcagagctcgccctgcaggaggcaattaggattgcccaggagtccaacgatcacgtgtgtctccagcactgtttgagctggctttatgtgctggggcagaagagatccgatagctatgttctgctggagcattctgtgaagaaggcagtacattttgggttaccgtacctcgcctccctgggaatacagtcccttgttcaacagagagcttttgctgggaagacggcaaacaagctgatggatgccctaaaggactccgacctcctgcactggaaacacagcctgtcagagctcatcgatatcagcatcgcacagaaaacggccatctggaggctgtatggccgcagcaccatggcactgcaacaggcccagatgttgctgagcatgaacagcctggaggcggtgaatgcgggcgtgcagcagaacaacacagagtcctttgctgtcgcactctgccacctcgcagagctacacgcggagcagggctgttttgctgcagcttctgaagtgttaaagcacttgaaggaacgatttccgcctaatagtcagcacgcccagttatggatgctatgtgatcaaaaaatacagtttgacagagcaatgaatgatggcaaatatcatttggctgattcacttgttacaggaatcacagctctcaatagcatagagggtgtttataggaaagcggttgtattacaagctcagaaccaaatgtcagaggcacataagcttttacaaaaattgttggttcattgtcagaaactgaagaacacagaaatggtgatcagtgtcctactgtccgtggcagagctgtactggcgatcttcctcccctaccatcgcgctgcccatgctcctgcaggctctggccctctccaaggagtaccggttacagtacttggcctctgaaacagtgctgaacttggcttttgcgcagctcattcttggaatcccagaacaggccttaagtcttctccacatggccatcgagcccatcttggctgacggggctatcctggacaaaggtcgtgccatgttcttagtggccaagtgccaggtggcttcagcagcttcctacgatcagccgaagaaagcagaagctctggaggctgccatcgagaacctcaatgaagccaagaactattttgcaaaggttgactgcaaagagcgcatcagggacgtcgtttacttccaggccagactctaccataccctggggaagacccaggagaggaaccggtgtgcgatgctcttccggcagctgcatcaggagctgccctctcatggggtacccttgataaaccatctctag

SEQ ID NO: 52 - DNA, 1771 bp, Homo sapiens
ggcggccaggccgggcgcggagtgggcgcgcggggccggaggaggggccagcgaccgcggcaccgcctgtgcccgcccgcccctccgcagccgctacttaagaggctccagcgccggccccgccctagtgcgttacttacctcgactcttagcttgtcggggacggtaaccgggacccggtgtctgctcctgtcgccttcgcctcctaatccctagccactatgcgtgagtgcatctccatccacgttggccaggctggtgtccagattggcaatgcctgctgggagctctactgcctggaacacggcatccagcccgatggccagatgccaagtgacaagaccattgggggaggagatgactccttcaacaccttcttcagtgagacgggcgctggcaagcacgtgccccgggctgtgtttgtagacttggaacccacagtcattgatgaagttcgcactggcacctaccgccagctcttccaccctgagcagctcatcacaggcaaggaagatgctgccaataactatgcccgagggcactacaccattggcaaggagatcattgaccttgtgttggaccgaattcgcaagctggctgaccagtgcaccggtcttcagggcttcttggttttccacagctttggtgggggaactggttctgggttcacctccctgctcatggaacgtctctcagttgattatggcaagaagtccaagctggagttctccatttacccagcaccccaggtttccacagctgtagttgagccctacaactccatcctcaccacccacaccaccctggagcactctgattgtgccttcatggtagacaatgaggccatctatgacatctgtcgtagaaacctcgatatcgagcgcccaacctacactaaccttaaccgccttattagccagattgtgtcctccatcactgcttccctgagatttgatggagccctgaatgttgacctgacagaattccagaccaacctggtgccctacccccgcatccacttccctctggccacatatgcccctgtcatctctgctgagaaagcctaccatgaacagctttctgtagcagagatcaccaatgcttgctttgagccagccaaccagatggtgaaatgtgaccctcgccatggtaaatacatggcttgctgcctgttgtaccgtggtgacgtggttcccaaagatgtcaatgctgccattgccaccatcaaaaccaagcgcagcatccagtttgtggattggtgccccactggcttcaaggttggcatcaactaccagcctcccactgtggtgcctggtggagacctggccaaggtacagagagctgtgtgcatgctgagcaacaccacagccattgctgaggcctgggctcgcctggaccacaagtttgacctgatgtatgccaagcgtgcctttgttcactggtacgtgggtgaggggatggaggaaggcgagttttcagaggcccgtgaagatatggctgcccttgagaaggattatgaggaggttggtgtggattctgttgaaggagagggtgaggaagaaggagaggaatactaattatccattccttttggccctgcagcatgtcatgctcccagaatttcagcttcagcttaactgacagacgttaaagctttctggttagattgttttcacttggtgatcatgtcttttccatgtgtacctgtaatatttttccatcatatctcaaagtaaagtcattaacatcaaaaaaaaaaaaaaaaaaaaaa

SEQ ID NO: 53 - DNA, 1431 bp, Homo sapiens
atgtccacgcagagacttcggaatgaagactaccacgactacagctccacggacgtgagccctgaggagagcccgtcggaaggcctcaacaacctctcctccccgggctcctaccagcgctttggtcaaagcaatagcacaacatggttccagaccttgatccacctgttaaaaggcaacattggcacaggactcctgggactccctctggcggtgaaaaatgcaggcatcgtgatgggtcccatcagcctgctgatcataggcatcgtggccgtgcactgcatgggtatcctggtgaaatgtgctcaccacttctgccgcaggctgaataaatcctttgtggattatggtgatactgtgatgtatggactagaatccagcccctgctcctggctccggaaccacgcacactggggaagacgtgttgtggacttcttcctgattgtcacccagctgggattctgctgtgtctattttgtgtttctggctgacaactttaaacaggtgatagaagcggccaatgggaccaccaataactgccacaacaatgagacggtgattctgacgcctaccatggactcgcgactctacatgctctccttcctgcccttcctggtgctgctggttttcatcaggaacctccgagccctgtccatcttctccctgttggccaacatcaccatgctggtcagcttggtcatgatctaccagttcattgttcagaggatcccagaccccagccacctccccttggtggccccttggaagacctaccctctcttctttggcacagcgattttttcatttgaaggcattggaatggttctgcccctggaaaacaaaatgaaggatcctcggaagttcccactcatcctgtacctgggcatggtcatcgtcaccatcctctacatcagcctggggtgtctggggtacctgcaatttggagctaatatccaaggcagcataaccctcaacctgcccaactgctggttgtaccagtcagttaagctgctgtactccatcgggatctttttcacctacgcactccagttctacgtcccggctgagatcatcatccccttctttgtgtcccgagcgcccgagcactgtgagttagtggtggacctgtttgtgcgcacagtgctggtctgcctgacatgcatcttggccatcctcatcccccgcctggacctggtcatctccctggtgggctccgtgagcagcagcgccctggccctcatcatcccaccgctcctggaggtcaccaccttctactcagagggcatgagccccctcaccatctttaaggacgccctgatcagcatcctgggcttcgtgggctttgtggtggggacctatgaggctctctatgagctgatccagccaagcaatgctcccatcttcatcaattccacctgtgccttcatatag

SEQ ID NO: 54 - DNA, 381 bp, Homo sapiens
atgcctgaaccggcaaaatccgctccggcccctaaaaagggctccaagaaagccgtcaccaaagcccagaagaaagacggcaagaagcgcaagcgcagccgcaaagagagctactccatctacgtgtacaaggtgctgaagcaggtccaccccgacaccggcatctcgtccaaggccatgggcatcatgaactccttcgtcaacgacatcttcgagcgcatcgcgggagaggcttcccgcctggcgcactacaacaagcgctccaccatcacatcccgcgagatccagacggccgtgcgcctgctgctgcccggcgagctggccaagcacgccgtgtccgagggcaccaaggcggtcaccaagtacaccagctccaagtga

SEQ ID NO: 55 - DNA, 1029 bp, Homo sapiens
atgtgctccacgatgtcggcccccacctgcctggcccacttgcctccctgcttcctgctgctggcactggtccttgtcccctcagatgcctctgggcagagcagcaggaatgactggcaggtgctacagcccgagggccccatgctggtggcagaaggtgagacacttctactgaggtgtatggtggtcggctcctgcactgatggtatgataaaatgggtgaaggtgagcactcaggaccaacaggaaatttataactttaaacgtggctccttccctggggtaatgcccatgatccaacggacatcagaaccactgaattgtgattattccatctatatccacaatgtcaccagggagcacactggaacctaccactgtgtgaggtttgatggtttgagtgaacactcagaaatgaaatcggatgaaggcacctcagtgcttgtgaagggagctggggaccctgaaccagacctgtggatcatccagccccaggaattggtgttggggaccactggagacactgtctttctgaactgcacagtgcttggagacggtccccctggacccatcaggtggttccagggagctggtctgagccgggaggccatttacaactttggaggcatctcccaccccaaggagacagcggtgcaggcctccaacaatgacttcagcattcttctgcaaaacgtctccagtgaggatgcaggcacctattactgtgtaaagtttcagaggaaacccaacaggcaatacctgtctggacagggcaccagcctgaaagtgaaagcaaaatctacctcttccaaagaggcagaattcaccagtgaacctgcaactgagatgtctccaacaggcctcctggttgtgttcgcacctgtggtcctggggctgaaggcaattaccttggctgcactcctactggccctggctacctctcggaggagccctgggcaagaagatgtcaagaccacaggcccagcaggagccatgaacaccttagcatggagcaagggtcaagagtga

SEQ ID NO: 56 - DNA, 1870 bp, Homo sapiens
aaaaaacaaccatttcctctctgctgagagccagggaaggcgagctctgcgcacacgggcgtccctgcagcagccactctgctttccaggaccggccaactgccctggaggcatccacacaggggcccaggcagcacagaggagctgtgaacccgctccacaccggccaccctgcccggagcctggcactcacagcaggccggtgctaaggagtgtggcgcgggctcgactcccactgctgccggcctcccgagtgactctgttttccactgctgcaggcgagaagaggcacgcgcggcacaggccggcctccgcttcccgggaagacggcgcactcctggccctgggttcttgctgctgcccaccctctgctccctgggatgggccccgaggcgagcagcttcagcacaggcctggccctgctccaggtgcaggaaggaggataaggccgggccgagaggcggcacacctggaccatcccatgggcctccgcccgcgccgccccgaggatgagtggtgatgtcctctagccacccctagcagcgtcggctctccctggacgtgcggccgcggactgggacttggctttctccggataagcggcggcaccggcgtcagcgatgaccgtgcagagactcgtggccgcggccgtgctggtggccctggtctcactcatcctcaacaacgtggcggccttcacctccaactgggtgtgccagacgctggaggatgggcgcaggcgcagcgtggggctgtggaggtcctgctggctggtggacaggacccggggagggccgagccctggggccagagccggccaggtggacgcacatgactgtgaggcgctgggctggggctccgaggcagccggcttccaggagtcccgaggcaccgtcaaactgcagttcgacatgatgcgcgcctgcaacctggtggccacggccgcgctcaccgcaggccagctcaccttcctcctggggctggtgggcctgcccctgctgtcacccgacgccccgtgctgggaggaggccatggccgctgcattccaactggcgagttttgtcctggtcatcgggctcgtgactttctacagaattggccatacaccaacctgtcctggtcctgctacctgaacattggcgcctgccttctggccacgctggcggcagccatgctcatctggaacattctccacaagagggaggactgcatggccccccgggtgattgtcatcagccgctccctgacagcgcgctttcgccgtgggctggacaatgactacgtggagtcaccatgctgagtcgcccttctcagcgttccatcgatgcacacctgctatcgtggaacagcctagaaaccaagggactccaccaccaagtcacttcccctgctcgtgcagaggcacgggatgagtctgggtgacctctgcgccatgcgtgcgagacacgtgtgcgtttactgttatgtcggtcatatgtctgtacgtgtcgtgggccaacctcgttctgcctccagctttcctggttagcgcaacgcggctccacgaccacacgcacttcagggtggaagctggaagctgagacacaggttaggtggcgcgaggctgccctgcgctccgctttgctttgggattaatttattctgcatctgctgagaggggcaccccagccatatcttacactttggtaaagcagaaaaccaggaaaattttcttaaaatatccacaatattccttgagtgagtcagaatctatagccggttagtgatggtttcaggcagaatcgtgttcgtgtctgttttgctcgattcctttcctaagttaaataaatgcaagcctctgaacttctgtctataaaaaaaaaaaaaaaaa

SEQ ID NO: 57 - DNA, 1005 bp, Homo sapiens
atgttccgctgggagcgctccattcccctgcgaggctcggccgccgccctgtgcaacaacctcagtgtgctgcagctgccggctcgcaacctcacgtattttggcgtggttcatggaccaagcgcccagcttctcagcgctgctcctgagggtgtgcccttggcccagcgccagctccacgctaaggagggtgctggagtgagtcccccacttatcactcaggtccactggtgtgtcctccccttccgagtgctgctggtactcacctcacatcgaggaatacagatgtacgagtccaatggctacaccatggtctactggcatgcactggactctggagatgcctccccagtacaggctgtgtttgcccggggaattgctgccagtggccacttcatctgtgtgggaacgtggtcaggccgggtgctggtgtttgacatcccagcaaagggtcccaacattgtactgagcgaggagctggctgggcaccagatgccaatcacagacattgccaccgagcctgcccagggacaggattgtgtggctgacatggtgacggcagatgactcaggcttgctgtgtgtctggcggtcagggccagaattcacattattgacccgcattccaggatttggagttccgtgcccctctgtgcagctgtggcaggggatcatagcagcaggctatgggaacggacaagtgcatctatatgaggccactacaggaaatctacatgtccagatcaatgcccatgcccgggccatctgcgccctggacctggcttctgaggtgggcaagctactctctgcaggtgaggacacctttgtgcatatctggaagctgagcagaaacccagagagtggctacattgaggtggaacactgtcatggtgagtgtgtcgccgacacccagctgtgtggtgctcgattttgtgattcctcaggcaactcctttgctgtgactggctatgaccttgcggagatccggagattcagcagtgtgtga

SEQ ID NO: 58 - DNA, 2586 bp, Homo sapiens
cgcgccgggaacagccagtcggtgcctaacgcgagtgtatctcgagagagaagcgatcaacagctgccggtctgcgcctgcgcggcgacggggcgtggccgcgggcgagtggggccaaggaggcagccgggagcgggggcgcaggtgttactggttgcgtcgggtcacgtgggcgcgcagcagaccgcggtgcagcccgttcgctcacacaaagcccagacgcggagaaaatggcggcaggggtcgaagcggcggcggaggtggcggcgacggagatcaaaatggaggaagagagcggcgcgcccggcgtgccgagcggcaacggggcttcgggccctaagggtgaaggagaacgacctgctcagaatgagaagaggaaggagaaaaacataaaaagaggaggcaatcgctttgagccatatgccaatccaactaaaagatacagagccttcattacaaacataccttttgatgtgaaatggcagtcacttaaagacctggttaaagaaaaagttggtgaggtaacatacgtggagctcttaatggacgctgaaggaaagtcaaggggatgtgctgttgttgaattcaagatggaagagagcatgaaaaaagctgcggaagtcctaaacaagcatagtctgagcggaagaccactgaaggtcaaagaagatcctgatggtgaatgtgccaggagagcaatgcaaaaggctggaagacttggaagcacagtatttgtagcaaatctggattataaagttggctggaagaaactgaaggaagtatttagtatggctggtgtggtggtccgagcagacattcttgaagataaagatggaaaaagtcgtggaataggcactgttacttttgaacagtccattgaagctgtgcaagctatatctatgttcaatggccagctgctatttgatagaccaatgcacgtcaagatggatgagagggccttaccaaaaggagatttcttccctcctgagcgtccacaacaacttccccatggccttggtggtattggcatggggttaggaccaggagggcaacccattgatgccaatcacctgaataaaggcatcggaatgggaaacataggtcccgcaggaatgggaatggaaggcataggatttggaataaataaaatgggaggaatggaggggccctttggtggtggtatggaaaacatgggtcgatttggatctgggatgaacatgggcaggataaatgaaatcctaagtaatgcactgaagagaggagagatcattgcaaagcagggaggaggtggaggtggaggaagcgtccctgggatcgagaggatgggtcctggcattgaccgcctcgggggtgccggcatggagcgcatgggcgcgggcctgggccacggcatggatcgcgtgggctccgagatcgagcgcatgggcctggtcatggaccgcatgggctccgtggagcgcatgggctccggcattgagcgcatgggcccgctgggcctcgaccacatggcctccagcattgagcgcatgggccagaccatggagcgcattggctctggcgtggagcgcatgggtgccggcatgggcttcggccttgagcgcatggccgctcccatcgaccgtgtgggccagaccattgagcgcatgggctctggcgtggagcgcatgggccctgccatcgagcgcatgggcccgagcatggagcgcatggtgcccgcaggtatgggagctggcctggagcgcatgggccccgtgatggatcgcatggccaccggcctggagcgcatgggcgccaacaatctggagcggatgggcctggagcgcatgggcgccaacagcctcgagcgcatgggcctggagcgcatgggtgccaacagcctcgagcgcatgggccccgccatgggcccggccctgggcgctggcattgagcgcatgggcctggccatgggtggcggtggcggtgccagctttgaccgtgccatcgagatggagcgtggcaacttcggaggaagcttcgcaggttcctttggtggagctggaggccatgctcctggggtggccaggaaggcctgccagatatttgtgagaaatctgccattcgatttcacatggaagatgctaaaggacaaattcaacgagtgcggccacgtgctgtacgccgacatcaagatggagaatgggaagtccaaggggtgtggtgtggttaagttcgagtcgccagaggtggccgagagagcctgccggatgatgaatggcatgaagctgagtggccgagagattgacgttcgaattgatagaaacgcttaagcagttgccttttttaaacatcgatacgagacctctgaatttgtattttttcttgttaaccattttaatttgttggctggatgtataaagatgtttaaaaaattcagttgctttttggggtaatttgaattacttttttaatgactggggttccatttgactgtttgcattgagattgcaatgtgcgcaattttttttgtagttgtggcatcttgttgacatcgaatatgactttgataataaataccggttcctgaaaaaaaaaaaaaaaaaaaaaaaa

SEQ ID NO: 59 - DNA, 966 bp, Homo sapiens
atgcagtgccggctcccgcggggcctggctggagccctcctcaccctcctgtgcatggggctcctgtgtctgcggtaccacttgaacctgtccccgcagcgggtacaagggacccccgagctgagccagccgaacccggggccccctaagctacagctacacgatgtcttcattgcagtgaagacgacccgggctttccaccgcttgcgcctggagctgctgcttgacacgtgggtttccaggaccagggaacagacatttgtcttcaccgacagcccagacaaaggcctccaggagagactggggtcccaccttgtggtcaccaactgctccgcggaacacagccacccagctctgtcctgcaagatggctgctgagttcgacaccttcttggccagtgggcttaggtggttctgccatgtggacgatgacaactatgtgaacccaagggcgctgctgcagcttctgagagccttcccgctggcccgcgacgtctatgtgggaaggcccagcctgaaccggcccatccatgcctcagagccacagccccacaaccgcacgaggctggtacagttctggtttgccactgggggtgctggcttctgcatcaatcgcaaactggctttgaagatggctccgtgggccagtggctcccgtttcatggacacatctgctctcatccggctgcctgatgactgcaccatgggctatatcattgagtgcaagctgggcggccgcctgcagcccagccccctctttcactcccacctggagaccctgcagctgctgaggactgcacagctcccagaacaggtcaccctcagctacggtgtctttgaggggaaactcaacgtcattaagctacagggccccttctccccggaggaggacccctccagatttcgctccctccattgtctgctctatccagatacaccctggtgtccccagctgggtgcccgatga

SEQ ID NO: 60 - DNA, 354 bp, Homo sapiens
atgaagttccagtacaaggaggaccatccctttgagtatcggaaaaaggaaggagaaaagatccggaagaaatatccggacagggtccccgtgattgtagagaaggctccaaaagccagggtgcctgatctggacaagaggaagtacctagtgccctctgaccttactgttggccagttctacttcttaatccggaagagaatccacctgagacctgaggacgccttattcttctttgtcaacaacaccatccctcccaccagtgctaccatgggccaactgtatgaggacaatcatgaggaagactattttctgtatgtggcctacagtgatgagagtgtctatgggaaatga

SEQ ID NO: 61 - DNA, 1161 bp, Homo sapiens
atggaagagttagatgccttattggaggaactggaacgctccacccttcaggacagtgatgaatattccaacccagctcctcttcccctggatcagcattccagaaaggagactaaccttgatgagacttcggagatcctttctattcaggataacacaagtcccttgccggcgcagctcgtgtatactaccaatatccaggagctcaatgtctacagtgaagcccaagagccaaaggaatcaccaccaccttctaaaacgtcagcagctgctcagttggatgagctcatggctcacctgactgagatgcaggccaaggttgcagtgagagcagatgctggcaagaagcacttaccagacaagcaggatcacaaggcctccctggactcaatgcttgggggtctggagcaggaattgcaggaccttggcattgccacagtgcccaagggccattgtgcatcctgccagaaaccgattgctgggaaggtgatccatgctctagggcaatcatggcatcctgagcattttgtctgtactcattgcaaagaagagattggctccagtcccttctttgagcggagtggcttggcctactgccccaacgactaccaccaacttttttctccacgctgtgcttactgcgctgctcccatcctggataaagtgctgacagcaatgaaccagacctggcacccagagcacttcttctgctctcactgcggagaggtgtttggtgcagaaggctttcatgagaaggacaagaagccatattgccgaaaggatttcttagccatgttctcacccaagtgtggtggctgcaatcgcccagtgttggaaaactacctttcagccatggacactgtctggcacccagagtgctttgtttgtggggactgcttcaccagtttttctactggctccttctttgaactggatggacgtccattctgtgagctccattaccatcaccgccggggaacgctctgccatgggtgtgggcagcccatcactggccgttgtatcagtgccatggggtacaagttccatcctgagcactttgtgtgtgctttctgcctgacacagttgtcgaagggcattttcagggagcagaatgacaagacctattgtcaaccttgcttcaataagctcttcccactgtaa

SEQ ID NO: 62 - DNA, 1277 bp, Homo sapiens
gatgtggcccgtggcctagctcgtcaagttgccgtggcgcggagaactctgcaaaacaagaggctgaggattgcgttagagataaaccagttcacgccggagccccgtgagggaagcgtctccgttgggtccggccgctctgcgggactctgaggaaaagctcgcaccaggtggacgcggatctgtcaacatgggtaaaggagaccccaacaagccgcggggcaaaatgtcctcgtacgccttcttcgtgcagacctgccgggaagagcacaagaagaaacacccggactcttccgtcaatttcgcggaattctccaagaagtgttcggagagatggaagaccatgtctgcaaaggagaagtcgaagtttgaagatatggcaaaaagtgacaaagctcgctatgacagggagatgaaaaattacgttcctcccaaaggtgataagaaggggaagaaaaaggaccccaatgctcctaaaaggccaccatctgccttcttcctgttttgctctgaacatcgcccaaagatcaaaagtgaacaccctggcctatccattggggatactgcaaagaaattgggtgaaatgtggtctgagcagtcagccaaagataaacaaccatatgaacagaaagcagctaagctaaaggagaaatatgaaaaggatattgctgcatatcgtgccaagggcaaaagtgaagcaggaaagaagggccctggcaggccaacaggctcaaagaagaagaacgaaccagaagatgaggaggaggaggaggaagaagaagatgaagatgaggaggaagaggatgaagatgaagaataaatggctatcctttaatgatgcgtgtggaatgtgtgtgtgtgctcaggcaattattttgctaagaatgtgaattcaagtgcagctcaatactagcttcagtataaaaactgtacagatttttgtatagctgataagattctctgtagagaaaatacttttaaaaaatgcaggttgtagctttttgatgggctactcatacagttagattttacagcttctgatgttgaatgttcctaaatatttaatggtttttttaatttctgtgtgtatggtagcacagcaaacttgtaggaattagtatcaatagtaaattttgggttttttaggatgttgcatttcgtttttttaaaaaaaattttgtaataaaattatgtatattatttctattgtctttgtcttaatatgctaagttaattttcactttaaaaaagccatttgaagaccaaaaaaaaaaaaa

SEQ ID NO: 63 - DNA, 1140 bp, Homo sapiens
cgcttccgctctctggccgggcttgggctgcgtggagaatactttttgcgatgcctactggagactttgattcgaagcccagttgggccgaccaggtggaggaggagggggaggacgacaaatgtgtcaccagcgagctcctcaaggggatccctctggccacaggtgacaccagcccagagccagagctactgccgggagctccactgccgcctcccaaggaggtcatcaacggaaacataaagacagtgacagagtacaagatagatgaggatggcaagaagttcaagattgtccgcaccttcaggattgagacccggaaggcttcaaaggctgtcgcaaggaggaagaactggaagaagttcgggaactcagagtttgacccccccggacccaatgtggccaccaccactgtcagtgacgatgtctctatgacgttcatcaccagcaaagaggacctgaactgccaggaggaggaggaccctatgaacaaactcaagggccagaagatcgtgtcctgccgcatctgcaagggcgaccactggaccacccgctgcccctacaaggatacgctggggcccatgcagaaggagctggccgagcagctgggcctgtctactggcgagaaggagaagctgccgggagagctagagccggtgcaggccacgcagaacaagacagggaagtatgtgccgccgagcctgcgcgacggggccagccgccgcggggagtccatgcagcccaaccgcagagccgacgacaacgccaccatccgtgtcaccaacttgtcagaggacacgcgtgagaccgacctgcaggagctcttccggcctttcggctccatctcccgcatctacctggctaaggacaagaccactggccaatccaagggctttgccttcatcagcttccaccgccgcgaggatgctgcgcgtgccattgccggggtgtccggctttggctacgaccacctcatcctcaacgtcgagtgggccaagccgtccaccaactaagccagctgccactgtgtactcggtccgggacccttggcgacagaagacagcctccgagagcgcgggctccaagggcaataaagcagctccactctctctaaaaaaaaaaaaaaaaaaaaaaaaaaaa

SEQ ID NO: 64 - DNA, 1892 bp, Homo sapiens
caagcttctgggtatttctattgcgcgaggcattgtgggttgctgggcggcccggtctcggagaagaggggagagtggcgggccgctgaataagcttccaaaatgatgcccacaccagttatcctattgaaagaggggactgatagctcccaaggcatcccccagcttgtgagtaacatcagtgcctgccaggtgattgctgaggctgtaagaactaccctgggtccccgtggcatggacaagcttattgtagatggcagaggcaaagcaacaatttctaatgatggggccacaattctgaaacttcttgatgttgtccatcctgcagcaaagactttggtagacattgccaaatcccaagatgctgaggtgggtgatggcaccacctcagtgaccttgctggctgcagagtttctgaagcaggtgaaaccctatgtggaggaaggtttacacccccagatcatcattcgagctttccgcacagccacccagctggcagttaacaagatcaaagagattgctgtgaccgtgaagaaggcagataaagtggagcagaggaagctgctggaaaagtgtgccatgaccgctctgagctccaagctgatctcccagcagaaagctttctttgctaagatggtggtggatgcagtgatgatgctcgatgatttgctgcagcttaaaatgattggaatcaagaaggtacagggtggagccctcgaggattctcagctggtagctggtgttgcattcaagaagactttctcttacgctgggtttgaaatgcaacccaaaaagtaccacaatcccaagattgcccttttgaatgtcgagctcgagttgaaagctgagaaagacaatgctgagataagagtccacacagttgaggattatcaggcaattgttgatgctgagtggaacattctctatgacaagttagagaagatccatcattctggagccaaagttgtcttgtccaaactccccattggggatgtggccacccagtactttgctgacagggacatgttctgtgctggccgagtacctgaggaggatctgaagaggacaatgatggcctgtggaggctcaatccagaccagtgtgaatgctctgtcagcagatgtgctgggtcgatgccaggtgtttgaagagacccagattggaggcgagaggtacaatttttttactggctgccccaaggccaagacatgcaccttcattctccgtggcggcgccgagcagtttatggaggagacagagcggtccctgcatgatgccatcatgatcgtcaggagggccatcaagaatgattcagtggtggctggtggcggggccattgagatggaactctccaagtacctgcgggattactcaaggactattccaggaaaacagcagctgttgattggggcatatgccaaggccttggagattatcccacgccagctgtgtgacaatgctggctttgatgccacaaacattctcaacaagctgcgggctcggcatgcccaggggggtacatggtatggagtagacatcaacaacgaggacattgctgacaactttgaagctttcgtgtgggagccagctatggtgcggatcaatgcgctgacagcagcctctgaggctgcgtgcctgatcgtgtctgtagatgaaaccatcaagaacccccgctcgactgtggatgctcccacagcagcaggccggggccgtggtcgtggccgcccccactgagaggcaccccacccatcacatggctggctggctgctgggtgcacttaccctccttggcttggttacttcattttacaaggaaggggtagtaattggcccactctcttcttactggaggctatttaaataaaatgtaagacttcagataactttgtaaa

SEQ ID NO: 65 - DNA, 1437 bp, Homo sapiens
atggcggcaggaggcagtggcgttggtgggaagcgcagctcgaaaagcgatgccgattctggtttcctggggctgcggcccacttcggtggacccagcgctgaggcggcggcggcgaggcccaagaaataagaagcggggctggcggcggcttgctcaggagccgctggggctggaggttgaccagttcctggaagacgtgcggctacaggagcgcacgagcggtggcttgttgtcagaggccccaaatgaaaaactcttcttcgtggacactggctccaaggaaaaagggctgacaaagaagagaaccaaagtccagaagaagtcactgcttctcaagaaaccccttcgggttgacctcatcctcgagaacacatccaaagtccctgcccccaaagacgtcctcgcccaccaggtccccaacgccaagaagctcaggcggaaggagcagctatgggagaagctggccaagcagggcgagctgccccgggaggtgcgcagggcccaggcccggctcctcaacccttctgcaacaagggccaagcccgggccccaggacaccgtagagcggcccttctacgacctctgggcctcagacaaccccctggacaggccgttggttggccaggatgagtttttcctggagcagaccaagaagaaaggagtgaagcggccagcacgcctgcacaccaagccgtcccaggcacccgccgtggaggtggcgcctgccggagcttcctacaatccatcctttgaagaccaccagaccctgctctcagcggcccacgaggtggagttgcagcggcagaaggaggcggagaagctggagcggcagctggccctgcccgccacggagcaggccgccacccaggagtccacattccaggagctgtgcgaggggctgctggaggagtcggatggtgagggggagccaggccagggcgaggggccggaggctggggatgccgaggtctgtcccacgcccgcccgcctggccaccacagagaagaagacggagcagcagcggcggcgggagaaggctgtgcacaggctgcgggtacagcaggccgcgttgcgggccgcccggctccggcaccaggagctgttccggctgcgcgggatcaaggcccaggtggccctgaggctggcggagctggcgcggcggcagaggcggcggcaggcgcggcgggaggctgaggctgacaagccccgaaggctggggcggctcaagtaccaggcacctgacatcgacgtgcagctgagctcggagctgacagactcgctcaggaccctgaagcccgagggcaacatccttcgagaccggttcaagagcttccagaggaggaatatgatcgagcctcgagagagagccaagttcaaacgcaagtacaaggtgaagctggtggagaagcgggcgttccgtgagatccagttgtag

SEQ ID NO: 66 - DNA, 1449 bp, Homo sapiens
atggcgcagacgcagggcacccggaggaaagtctgttactactacgacggggatgttggaaattactattatggacaaggccacccaatgaagcctcaccgaatccgcatgactcataatttgctgctcaactatggtctctaccgaaaaatggaaatctatcgccctcacaaagccaatgctgaggagatgaccaagtaccacagcgatgactacattaaattcttgcgctccatccgtccagataacatgtcggagtacagcaagcagatgcagagattcaacgttggtgaggactgtccagtattcgatggcctgtttgagttctgtcagttgtctactggtggttctgtggcaagtgctgtgaaacttaataagcagcagacggacatcgctgtgaattgggctgggggcctgcaccatgcaaagaagtccgaggcatctggcttctgttacgtcaatgatatcgtcttggccatcctggaactgctaaagtatcaccagagggtgctgtacattgacattgatattcaccatggtgacggcgtggaagaggccttctacaccacggaccgggtcatgactgtgtcctttcataagtatggagagtacttcccaggaactggggacctacgggatatcggggctggcaaaggcaagtattatgctgttaactacccgctccgagacgggattgatgacgagtcctatgaggccattttcaagccggtcatgtccaaagtaatggagatgttccagcctagtgcggtggtcttacagtgtggctcagactccctatctggggatcggttaggttgcttcaatctaactatcaaaggacacgccaagtgtgtggaatttgtcaagagctttaacctgcctatgctgatgctgggaggcggtggttacaccattcgtaacgttgcccggtgctggacatatgagacagctgtggccctggatacggagatccctaatgagcttccatacaatgactactttgaatactttggaccagatttcaagctccacatcagtccttccaatatgactaaccagaacacgaatgagtacctggagaagatcaaacagcgactgtttgagaaccttagaatgctgccgcacgcacctggggtccaaatgcaggcgattcctgaggacgccatccctgaggagagtggcgatgaggacgaagacgaccctgacaagcgcatctcgatctgctcctctgacaaacgaattgcctgtgaggaagagttctccgattctgaagaggagggagaggggggccgcaagaactcttccaacttcaaaaaagccaagagagtcaaaacagaggatgaaaaagagaaagacccagaggagaagaaagaagtcaccgaagaggagaaaaccaaggaggagaagccagaagccaaaggggtcaaggaggaggtcaagttggcctga

SEQ ID NO: 67 - DNA, 2175 bp, Homo sapiens
atgcctgaggaagtgcaccatggagaggaggaggtggagacttttgcctttcaggcagaaattgcccaactcatgtccctcatcatcaataccttctattccaacaaggagattttccttcgggagttgatctctaatgcttctgatgccttggacaagattcgctatgagagcctgacagacccttcgaagttggacagtggtaaagagctgaaaattgacatcatccccaaccctcaggaacgtaccctgactttggtagacacaggcattggcatgaccaaagctgatctcataaataatttgggaaccattgccaagtctggtactaaagcattcatggaggctcttcaggctggtgcagacatctccatgattgggcagtttggtgttggcttttattctgcctacttggtggcagagaaagtggttgtgatcacaaagcacaacgatgatgaacagtatgcttgggagtcttctgctggaggttccttcactgtgcgtgctgaccatggtgagcccattggcaggggtaccaaagtgatcctccatcttaaagaagatcagacagagtacctagaagagaggcgggtcaaagaagtagtgaagaagcattctcagttcataggctatcccatcaccctttatttggagaaggaacgagagaaggaaattagtgatgatgaggcagaggaagagaaaggtgagaaagaagaggaagataaagatgatgaagaaaaacccaagatcgaagatgtgggttcagatgaggaggatgacagcggtaaggataagaagaagaaaactaagaagatcaaagagaaatacattgatcaggaagaactaaacaagaccaagcctatttggaccagaaaccctgatgacatcacccaagaggagtatggagaattctacaagagcctcactaatgactgggaagaccacttggcagtcaagcacttttctgtagaaggtcagttggaattcagggcattgctatttattcctcgtcgggctccctttgacctttttgagaacaagaagaaaaagaacaacatcaaactctatgtccgccgtgtgttcatcatggacagctgtgatgagttgataccagagtatctcaattttatccgtggtgtggttgactctgaggatctgcccctgaacatctcccgagaaatgctccagcagagcaaaatcttgaaagtcattcgcaaaaacattgttaagaagtgccttgagctcttctctgagctggcagaagacaaggagaattacaagaaattctatgaggcattctctaaaaatctcaagcttggaatccacgaagactccactaaccgccgccgcctgtctgagctgctgcgctatcatacctcccagtctggagatgagatgacatctctgtcagagtatgtttctcgcatgaaggagacacagaagtccatctattacatcactggtgagagcaaagagcaggtggccaactcagcttttgtggagcgagtgcggaaacggggcttcgaggtggtatatatgaccgagcccattgacgagtactgtgtgcagcagctcaaggaatttgatgggaagagcctggtctcagttaccaaggagggtctggagctgcctgaggatgaggaggagaagaagaagatggaagagagcaaggcaaagtttgagaacctctgcaagctcatgaaagaaatcttagataagaaggttgagaaggtgacaatctccaatagacttgtgtcttcaccttgctgcattgtgaccagcacctacggctggacagccaatatggagcggatcatgaaagcccaggcacttcgggacaactccaccatgggctatatgatggccaaaaagcacctggagatcaaccctgaccaccccattgtggagacgctgcggcagaaggctgaggccgacaagaatgataaggcagttaaggacctggtggtgctgctgtttgaaaccgccctgctatcttctggcttttcccttgaggatccccagacccactccaaccgcatctatcgcatgatcaagctaggtctaggtattgatgaagatgaagtggcagcagaggaacccaatgctgcagttcctgatgagatcccccctctcgagggcgatgaggatgcgtctcgcatggaagaagtcgattag

SEQ ID NO: 68 - DNA, 1992 bp, Homo sapiens
atggcccaggggacattgatccgtgtgaccccagagcagcccacccatgccgtgtgtgtgctgggcaccttgactcagcttgacatctgcagctctgcccctgaggactgcacgtccttcagcatcaacgcctccccaggggtggtcgtggatattgcccacggccctccagccaagaagaaatccacaggttcctccacatggcccctggaccctggggtagaggtgaccctgacgatgaaagtggccagtggtagcacaggcgaccagaaggttcagatttcatactacggacccaagactccaccagtcaaagctctactctacctcaccggggtggaaatctccttgtgcgcagacatcacccgcaccggcaaagtgaagccaaccagagctgtgaaagatcagaggacctggacctggggcccttgtggacagggtgccatcctgctggtgaactgtgacagagacaatctcgaatcttctgccatggactgcgaggatgatgaagtgcttgacagcgaagacctgcaggacatgtcgctgatgaccctgagcacgaagacccccaaggacttcttcacaaaccatacactggtgctccacgtggccaggtctgagatggacaaagtgagggtgtttcaggccacacggggcaaactgtcctccaagtgcagcgtagtcttgggtcccaagtggccctctcactacctgatggtccccggtggaaagcacaacatggacttctacgtggaggccctcgctttcccggacaccgacttcccggggctcattaccctcaccatctccctgctggacacgtccaacctggagctccccgaggctgtggtgttccaagacagcgtggtcttccgcgtggcgccctggatcatgacccccaacacccagcccccgcaggaggtgtacgcgtgcagtatttttgaaaatgaggacttcctgaagtcagtgactactctggccatgaaagccaagtgcaagctgaccatctgccctgaggaggagaacatggatgaccagtggatgcaggatgaaatggagatcggctacatccaagccccacacaaaacgctgcccgtggtcttcgactctccaaggaacagaggcctgaaggagtttcccatcaaacgcgtgatgggtccagattttggctatgtaactcgagggccccaaacagggggtatcagtggactggactcctttgggaacctggaagtgagccccccagtcacagtcaggggcaaggaatacccgctgggcaggattctcttcggggacagctgttatcccagcaatgacagccggcagatgcaccaggccctgcaggacttcctcagtgcccagcaggtgcaggcccctgtgaagctctattctgactggctgtccgtgggccacgtggacgagttcctgagctttgtgccagcacccgacaggaagggcttccggctgctcctggccagccccaggtcctgctacaaactgttccaggagcagcagaatgagggccacggggaggccctgctgttcgaagggatcaagaaaaaaaaacagcagaaaataaagaacattctgtcaaacaagacattgagagaacataattcatttgtggagagatgcatcgactggaaccgcgagctgctgaagcgggagctgggcctggccgagagtgacatcattgacatcccgcagctcttcaagctcaaagagttctctaaggcggaagcttttttccccaacatggtgaacatgctggtgctagggaagcacctgggcatccccaagcccttcgggcccgtcatcaacggccgctgctgcctggaggagaaggtgtgttccctgctggagccactgggcctccagtgcaccttcatcaacgacttcttcacctaccacatcaggcatggggaggtgcactgcggcaccaacgtgcgcagaaagcccttctccttcaagtggtggaacatggtgccctga

SEQ ID NO: 69 - DNA, 906 bp, Homo sapiens
atgacgcggcatggcaagaactgcaccgcaggggccgtctacacctaccacgagaagaagaaggacacagcggcctcgggctatgggacccagaacattcgactgagccgggatgccgtgaaggacttcgactgctgttgtctctccctgcagccttgccacgatcctgttgtcaccccagatggctacctgtatgagcgtgaggccatcctggagtacattctgcaccagaagaaggagattgcccggcagatgaaggcctacgagaagcagcggggcacccggcgcgaggagcagaaggagcttcagcgggcggcctcgcaggaccatgtgcggggcttcctggagaaggagtcggctatcgtgagccggcccctcaaccctttcacagccaaggccctctcgggcaccagcccagatgatgtccaacctgggcccagtgtgggtcctccaagtaaggacaaggacaaagtgctgcccagcttctggatcccgtcgctgacgcccgaagccaaggccaccaagctggagaagccgtcccgcacggtgacctgccccatgtcagggaagcccctgcgcatgtcggacctgacgcccgtgcacttcacaccgctagacagctccgtggaccgcgtggggctcatcacccgcagcgagcgctacgtgtgtgccgtgacccgcgacagcctgagcaacgccaccccctgcgctgtgctgcggccctctggggctgtggtcaccctcgaatgcgtggagaagctgattcggaaggacatggtggaccctgtgactggagacaaactcacagaccgcgacatcatcgtgctgcagcggggcggtaccggcttcgcgggctccggagtgaagctgcaagcggagaaatcacggccggtgatgcaggcctga

SEQ ID NO: 70 - DNA, 498 bp, Homo sapiens
atggcggatttcgacgaaatctatgaggaagaggaggacgaggagcgggccctggaggagcagctgctcaagtactcgccggacccggtggtcgtccgcggctccggtcacgtcaccgtatttggactgagcaacaaatttgaatctgaattcccttcttcattaactggaaaagtagctcctgaagaatttaaagccagcatcaacagagttaacagttgtcttaagaagaaccttcctgttaatgtacgttggctactttgtggctgcctttgttgctgctgcacattaggttgcagtatgtggccagttatttgcctcagtaaaagaacacgaagatcgattgagaagttattagaatgggaaaacaataggttataccacaagctgtgcttgcattggagactgagcaaaaggaaatgtgaaacgaataacatgatggaatatgtcatcctcatagaatttttaccaaagacaccgatttttcgaccagattag

SEQ ID NO: 71 - DNA, 1970 bp, Homo sapiens
ccgagtggggctgaacttccggcctcaggacgcaggcgcgggccgctcatttcgctctttccggcggtgctcgcaagcgaggcagccatgtcttatcccgctgatgattatgagtctgaggcggcttatgacccctacgcttatcccagcgactatgatatgcacacaggagatccaaagcaggaccttgcttatgaacgtcagtatgaacagcaaacctatcaggtgatccctgaggtgatcaaaaacttcatccagtatttccacaaaactgtctcagatttgattgaccagaaagtgtatgagctacaggccagtcgtgtctccagtgatgtcattgaccagaaggtgtatgagatccaggacatctatgagaacagctggaccaagctgactgaaagattcttcaagaatacaccttggcccgaggctgaagccattgctccacaggttggcaatgatgctgtcttcctgattttatacaaagaattatactacaggcacatatatgccaaagtcagtgggggaccttccttggagcagaggtttgaatcctattacaactactgcaatctcttcaactacattcttaatgccgatggtcctgctccccttgaactacccaaccagtggctctgggatattatcgatgagttcatctaccagtttcagtcattcagtcagtaccgctgtaagactgccaagaagtcagaggaggagattgactttcttcgttccaatcccaaaatctggaatgttcatagtgtcctcaatgtccttcattccctggtagacaaatccaacatcaaccgacagttggaggtatacacaagcggaggtgaccctgagagtgtggctggggagtatgggcggcactccctctacaaaatgcttggttacttcagcctggtcgggcttctccgcctgcactccctgttaggagattactaccaggccatcaaggtgctggagaacatcgaactgaacaagaagagtatgtattcccgtgtgccagagtgccaggtcaccacatactattatgttgggtttgcatatttgatgatgcgtcgttaccaggatgccatccgggtcttcgccaacatcctcctctacatccagaggaccaagagcatgttccagaggaccacgtacaagtatgagatgattaacaagcagaatgagcagatgcatgcgctgctggccattgccctcacgatgtaccccatgcgtattgatgagagcattcacctccagctgcgggagaaatatggggacaagatgttgcgcatgcagaaaggtgacccacaagtctatgaagaacttttcagttactcctgccccaagttcctgtcgcctgtagtgcccaactatgataatgtgcaccccaactaccacaaagagcccttcctgcagcagctgaaggtgttttctgatgaagtacagcagcaggcccagctttcaaccatccgcagcttcctgaagctctacaccaccatgcctgtggccaagctggctggcttcctggacctcacagagcaggagttccggatccagcttcttgtcttcaaacacaagatgaagaacctcgtgtggaccagcggtatctcagccctggatggtgaatttcagtcagcctcagaggttgacttctacattgataaggacatgatccacatcgcggacaccaaggtcgccaggcgttatggggatttcttcatccgtcagatccacaaatttgaggagcttaatcgaaccctgaagaagatgggacagagaccttgatgatattcacacacattcaggaacctgttttgatgtattataggcaggaagtgtttttgctaccgtgaaacctttacctagatcagccatcagcctgtcaactcagttaacaagttaaggaccgaagtgtttcaagtggatctcagtaaaggatctttggagccagaaaaaaaaaaaaaaaaaaaaaa

SEQ ID NO: 72 - DNA, 957 bp, Homo sapiens
atggacaaacaaaactcacagatgaatgcttctcacccggaaacaaacttgccagttgggtatcctcctcagtatccaccgacagcattccaaggacctccaggatatagtggctaccctgggccccaggtcagctacccacccccaccagccggccattcaggtcctggcccagctggctttcctgtcccaaatcagccagtgtataatcagccagtatataatcagccagttggagctgcaggggtaccatggatgccagcgccacagcctccattaaactgtccacctggattagaatatttaagtcagatagatcagatactgattcatcagcaaattgaacttctggaagttttaacaggttttgaaactaataacaaatatgaaattaagaacagctttggacagagggtttactttgcagcggaagatactgattgctgtacccgaaattgctgtgggccatctagaccttttaccttgaggattattgataatatgggtcaagaagtcataactctggagagaccactaagatgtagcagctgttgttgtccctgctgccttcaggagatagaaatccaagctcctcctggtgtaccaataggttatgttattcagacttggcacccatgtctaccaaagtttacaattcaaaatgagaaaagagaggatgtactaaaaataagtggtccatgtgttgtgtgcagctgttgtggagatgttgattttgagattaaatctcttgatgaacagtgtgtggttggcaaaatttccaagcactggactggaattttgagagaggcatttacagacgctgataactttggaatccagttccctttagaccttgatgttaaaatgaaagctgtaatgattggtgcctgtttcctcattgacttcatgttttttgaaagcactggcagccaggaacaaaaatcaggagtgtggtag

SEQ ID NO: 73 - DNA, 881 bp, Homo sapiens
gcgccatggcgctgtcctggctgcagcgcgtcgagcttgcgctctttgctgccgccttcctgtgcggggccgtggcggccgcggcgatgactcggacccagggctccttcagtggtagatgtcccctgtatggtgtggccaccctgaatggctcctccctggccttatcccgtccctcagcaccatccctgtgctactttgtagctggggcctctggcctcttggccctctactgcctcctgcttttgctcttctggatctacagcagctgcatcgaggactcccacagaggtgctatagggctgcgcattgcactggccatctcagctatagccgtcttcctggtcttggtgtctgcctgtatccttcgatttggcaccaggtctctctgcaactccatcatctccttgaacactacaattagctgttctgaagcccagaaaattccatggacaccccctggaactgctctgcagttttactccaacctacacaatgctgaaacctcttcttgggtgaatttggtattgtggtgtgtggtcttggtgctccaggtcgtgcagtggaagtctgaagccaccccataccggcctctggagaggggtgaccctgagtggagctctgagacagatgctctcgttgggtcacgcctttcccattcctgaagaataagcggagtgcttcctgcagccgaagactccatgcccaagtgcctgtaatcccccccctcaaggccctgtttatgttgggagtcttagttttcctttcgttggggggtgggggggaaacataatgacaggcccccctccacctcttcctgcagctgtttttgtaccaaaatattatattactgtcttcatcttaaaaaaaaaaaaaaaaaa

SEQ ID NO: 74 - DNA, 5169 bp, Homo sapiens
atgagtgacccaaggcagtcacaagaagagaagcacaagctaggcagagcctcttcaaagttcaaggatccccctagaatcatgcagtcagatgattattttgctcggaaatttaaagccattaatggcaacatgggacccactacttctttaaatgcctcgaattccaatgagactggcggtggtggtccggctaatggtaccccagctgtgcccaagatgggtgtgagagcaagggtgtctgaatggcctcctaaaaaggactgttccaaggagctaacatgcaaggcactgtgggaaagccggtctcagaccagttatgaaagcatcacttctgtcctgcagaatgggcagagtgaccagagtgaaggtcagcaagatgaacagctcgatctggacttcgtggaggccaagtacacaatcggagacatctttgtccattccccccaaagaggacttcaccccataagacagaggagcaatagtgatgtcactatcagtgacattgatgccgaagatgtcttagaccaaaatgcagtcaaccccaacaccggggctgccctgcacagggagtatggaagtacttcatccatcgacaggcaaggcttatctggtgaaaacttttttgctatgctcagagggtaccgagtagaaaattatgaccacaaagcaatggtcccttttgggttccctgaatttttccgctgtgaccctgcaatctctccgagccttcatgcagcagcacagatttctaggggagaatttgtccgcatctcaggattagattatgtggacagtgccctcctgatggggagagacagggacaagcctttcaaacggaggttgaaatcagagtcggtggaaacatctctcttccgaaagcttcgaactgttaaaagtgagcacgaaactttcaagttcacgtctgagctggaggagagccgactggagaggggcattcgcccttggaattgtcagcgatgttttgcacattatgatgtccagagcattttgtttaatatcaacgaagccatggctacgagggctaatgtggggaaaaggaaaaacataaccactggggcatctgcagcatcccagactcagatgcctacgggccagacaggcaactgtgagtcccctttagggagcaaggaggacctcaactccaaagagaacctggatgccgatgagggtgatgggaaaagtaacgacctcgtccttagttgtccttactttagaaatgagactggaggggaaggcgacaggcggattgcgctctctcgagccaactcatcctctttcagttctggggaaagctgctctttcgaatcgtcactcagctctcactgcacaaatgcaggtgtctccgtcttggaagtgcccagagaaaaccagcctattcacagggagaaagtgaagcgctacatcatagaacacattgaccttggggcctattattaccgcaaattcttctatgggaaagagcaccaaaactactttggaatagatgaaaaccttggtccagtagcagtcagcatccggagagagaaggtggaagatgccaaggagaaagaaggatcccagttcaactacagggtggctttcaggacaagtgagcttacaacactgagaggagcaattttagaagatgctataccctctactgctaggcatggtaccgcacgaggactacctctcaaagaagttttggaatacgtcattccagagctgagcattcagtgtttgcgacaggcttccaactcacccaaggtctcagagcagctgctcaagcttgatgaacaagggctgagctttcagcacaagatcgggatcctttattgcaaagcaggccagagcacagaggaagagatgtataacaatgagacggcgggaccagcttttgaagaattccttgatcttctgggccagagagtccgactgaaaggatttagtaaatatcgagctcagctagacaataagactgattccacgggcacgcactctctctataccacatacaaagactacgaactcatgttccacgtgtcaaccctgcttccctacatgcccaacaacagacaacagctactgaggaaaaggcacataggaaatgacatcgtcaccatcgtcttccaggagcctggggcacttccttttactccaaaaagcatccggtctcactttcagcatgtctttgtcatagtcaaagtgcataatccatgtaccgaaaatgtgtgttatagtgttggagtttccagatcaaaagatgtgccaccatttggcccaccgattcccaaaggtgtaacttttccaaagtcagccgtgttccgggacttccttttagccaaagtaatcaatgcagaaaatgcagcccataaatcagaaaagtttcgagcaatggccactcgaacgaggcaggagtacttgaaagatctggcggagaactttgtcacaaccgccaccgtggatacctctgtgaagttcagcttcattacgctgggtgcgaagaaaaaggagaaggtaaagccaaggaaggatgcccacttgtttagcattggggccatcatgtggcacgtgatagcccgggacttcggccagtctgctgacattgaatgtcttctcgggatctccaatgagttcatcatgttgattgaaaaggattccaagaatgttgtattcaactgttcctgcagggatgtgattgggtggacatctggattagtgagtatcaaagtgttttacgaaagaggagaatgtgtcctcctgtcctcggtagacaactgtgctgaagacatcagggaaattgttcagcgattagtaatagtgacgagaggctgcgagactgtggaaatgaccctgaggaggaacgggctgggccagcttggcttccatgtgaattttgaaggaattgtcgcagatgtggaaccttttggctttgcctggaaggctggccttcgccaagggagccgcctcgtggagatctgcaaagtagccgtggccactctgacccacgagcagatgatcgacctgctccgtacttctgtgactgtgaaggtggtcatcatccagccccatgatgacggctcgccccgaagagggtgttcagagctctgccggatccctatggtggaatataaactcgacagcgagggcaccccctgcgagtataaaacccccttcaggaggaacaccacgtggcaccgggtgcccactcctgccctgcagcccctctctagagcttcccccatccccggcacgcccgaccggctgccgtgccaacagctgctccagcaggcccaggctgccattcctcgaagcacctccttcgaccggaagctgcccgatggcacgagaagctcacccagcaaccagtcatcctccagcgaccctggacccggcgggagcggaccctggagaccacaagtgggctacgacgggtgccagtcccctctactgctcgaacaccagggctcaggccctttggaatgtgacggagccagggagagggaagacaccatggaagcaagcaggcacccggaaaccaaatggcatggcccaccttccaaagtcctgggttcctataaagaaagagctctgcagaaagatggaagttgcaaagattcccccaataagctttctcacattggggataaaagttgctccagtcactccagcagcaacacgctctccagcaacacctccagcaacagtgacgacaagcactttgggtctggcgacctgatggaccccgaattactggggctgacctacatcaaaggggcctccaccgacagtggcatcgacacggccccctgcatgcctgccaccatcctcggccctgtgcacctggcaggcagcaggtccctgatccacagccgggccgagcagtgggctgatgctgccgacgtctctgggcctgacgacgagccagccaagttatattctgtgcatggctacgcgtccaccatctccgccggcagtgctgcggaaggcagcatgggcgatctcagtgagatatcctctcattccagtggttctcaccattcaggaagcccttcagctcactgttcaaaaagtagtgggtctctggattcatccaaagtctacatcgtgtctcacagcagcggacaacaggttcccgggtccatgtccaagccctaccacagacaaggggcagtgaacaaatatgtcatcggctggaagaaatcggagggcagcccaccgcccgaggagcctgaagtgactgaatgtcccgggatgtatagtgagatggatgtcatgtccacagcaactcagcatcagacagtggtgggagatgctgttgcagagactcaacatgttctgtctaaagaagattttctgaaattgatgcttcctgacagccccttagtggaggaggggcgaagaaagttttcgttctatgggaacctgtctccaaggaggtcgctttaccgcacgctgtctgacgagagcatctgcagcaacaggagggggtcctcctttggcagttcccggagttccgtgcttgaccaggccctgcccaacgacattctgttcagcaccaccccaccctaccacagcacgctgcctccgcgggcccaccccgcacccagcatggggagcctgagaaatgagttctggttctccgatgggtccttatcagataagtccaagtgcgcagatcctggcctgatgcccctcccggacacagccacagggttagattggacccacctcgtggatgctgcacgggcatttgaaggtcttgactcagatgaagaactggggctgctctgtcaccacacgtcctatctagaccagagggtggcatccttctgcaccctgacagatatgcagcatgggcaggacctggaaggggcccaagagctgcccttatgtgtagatccaggcagtggcaaagagttcatggacacaactggggagcgttctccatcaccactgaccgggaaagtcaatcagctggaattaattcttcgacaactccagaccgaccttcggaaggaaaaacaagacaaggccgttctccaagcagaagtgcagcacctgagacaggacaacatgagactgcaggaggagtcccagaccgcgacagctcagctgcggaaattcacagaatggtttttcaccaccatcgacaaaaaatcttag

SEQ ID NO: 75 - DNA, 1968 bp, Homo sapiens; identical to SEQ ID NO: 40

SEQ ID NO: 76 - DNA, 774 bp, Homo sapiens
atgggccgtgtgatccgtggacagaggaagggcgccgggtctgtgttccgcgcgcacgtgaagcaccgtaaaggcgctgcgcgcctgcgcgccgtggatttcgctgagcggcacggctacatcaagggcatcgtcaaggacatcatccacgacccgggccgcggcgcgcccctcgccaaggtggtcttccgggatccgtatcggtttaagaagcggacggagctgttcattgccgccgagggcattcacacgggccagtttgtgtattgcggcaagaaggcccagctcaacattggcaatgtgctccctgtgggcaccatgcctgagggtacaatcgtgtgctgcctggaggagaagcctggagaccgtggcaagctggcccgggcatcagggaactatgccaccgttatctcccacaaccctgagaccaagaagacccgtgtgaagctgccctccggctccaagaaggttatctcctcagccaacagagctgtggttggtgtggtggctggaggtggccgaattgacaaacccatcttgaaggctggccgggcgtaccacaaatataaggcaaagaggaactgctggccacgagtacggggtgtggccatgaatcctgtggagcatccttttggaggtggcaaccaccagcacatcggcaagccctccaccatccgcagagatgcccctgctggccgcaaagtgggtctcattgctgcccgccggactggacgtctccggggaaccaagactgtgcaggagaaagagaactag

SEQ ID NO: 77 - DNA, 1086 bp, Homo sapiens
atgttctcgtccgtggcgcacctggcgcgggcgaaccccttcaacacgccacatctgcagctggtgcacgatggtctcggggacctccgcagcagctccccagggcccacgggccagccccgccgccctcgcaacctggcagccgccgccgtggaagagtacagttgtgaatttggctccgcgaagtattatgcactgtgtggctttggtggggtcttaagttgtggtctgacacacactgctgtggttcccctggatttagtgaaatgccgtatgcaggtggacccccaaaagtacaagggcatatttaacggattctcagttacacttaaagaggatggtgttcgtggtttggctaaaggatgggctccgactttccttggctactccatgcagggactctgcaagtttggcttttatgaagtctttaaagtcttgtatagcaatatgcttggagaggagaatacttatctctggcgcacatcactatatttggctgcctctgccagtgctgaattctttgctgacattgccctggctcctatggaagctgctaaggttcgaattcaaacccagccaggttatgccaacactttgagggatgcagctcccaaaatgtataaggaagaaggcctaaaagcattctacaagggggttgctcctctctggatgagacagataccatacaccatgatgaagttcgcctgctttgaacgtactgttgaagcactgtacaagtttgtggttcctaagccccgcagtgaatgttcaaagccagagcagctggttgtaacatttgtagcaggttacatagctggagtcttttgtgcaattgtttctcaccctgctgattctgtggtatctgtgttgaataaagaaaaaggtagcagtgcttctctggtcctcaagagacttggatttaaaggtgtatggaagggactgtttgcccgtatcatcatgattggtaccctgactgcactacagtggtttatctatgactccgtgaaggtctacttcagacttcctcgccctcctccacccgagatgccagagtctctgaagaagaagcttgggttaactcagtag

SEQ ID NO: 78 - DNA, 485 bp, Homo sapiens
gaaggaaagatgaacttgagtttcacttcttagtgccttttctcaggggagaggccatcacttgaagatgctgagtcttctgctccttctcctgggactaggctctgtgttcagtgctgtcatctctcaaaagccaagcagggatatctgtcaacgtggaacctccctgacgatccagtgtcaagtcgatagccaagtcaccatgatgttctggtaccgtcagcaacctggacagagcctgacactgatcgcaactgcaaatcagggctctgaggccacatatgagagtggatttgtcattgacaagtttcccatcagccgcccaaacctaacattctcaactctgactgtgagcaacatgagccctgaagacagcagcatatatctctgcagcgttgaagatagggacagagtctacaatgagcagttcttcgggccagggacacggctcaccgtgctagaggacctgaaaaacgtgttcccac

SEQ ID NO: 79 - DNA, 1941 bp, Homo sapiens
atgtccaagggacctgcagttggtattgatcttggcaccacctactcttgtgtgggtgttttccagcacggaaaagtcgagataattgccaatgatcagggaaaccgaaccactccaagctatgtcgcctttacggacactgaacggttgatcggtgatgccgcaaagaatcaagttgcaatgaaccccaccaacacagtttttgatgccaaacgtctgattggacgcagatttgatgatgctgttgtccagtctgatatgaaacattggccctttatggtggtgaatgatgctggcaggcccaaggtccaagtagaatacaagggagagaccaaaagcttctatccagaggaggtgtcttctatggttctgacaaagatgaaggaaattgcagaagcctaccttgggaagactgttaccaatgctgtggtcacagtgccagcttactttaatgactctcagcgtcaggctaccaaagatgctggaactattgctggtctcaatgtacttagaattattaatgagccaactgctgctgctattgcttacggcttagacaaaaaggttggagcagaaagaaacgtgctcatctttgacctgggaggtggcacttttgatgtgtcaatcctcactattgaggatggaatctttgaggtcaagtctacagctggagacacccacttgggtggagaagattttgacaaccgaatggtcaaccattttattgctgagtttaagcgcaagcataagaaggacatcagtgagaacaagagagctgtaagacgcctccgtactgcttgtgaacgtgctaagcgtaccctctcttccagcacccaggccagtattgagatcgattctctctatgaaggaatcgacttctatacctccattacccgtgcccgatttgaagaactgaatgctgacctgttccgtggcaccctggacccagtagagaaagcccttcgagatgccaaactagacaagtcacagattcatgatattgtcctggttggtggttctactcgtatccccaagattcagaagcttctccaagacttcttcaatggaaaagaactgaataagagcatcaaccctgatgaagctgttgcttatggtgcagctgtccaggcagccatcttgtctggagacaagtctgagaatgttcaagatttgctgctcttggatgtcactcctctttcccttggtattgaaactgctggtggagtcatgactgtcctcatcaagcgtaataccaccattcctaccaagcagacacagaccttcactacctattctgacaaccagcctggtgtgcttattcaggtttatgaaggcgagcgtgccatgacaaaggataacaacctgcttggcaagtttgaactcacaggcatacctcctgcaccccgaggtgttcctcagattgaagtcacttttgacattgatgccaatggtatactcaatgtctctgctgtggacaagagtacgggaaaagagaacaagattactatcactaatgacaagggccgtttgagcaaggaagacattgaacgtatggtccaggaagctgagaagtacaaagctgaagatgagaagcagagggacaaggtgtcatccaagaattcacttgagtcctatgccttcaacatgaaagcaactgttgaagatgagaaacttcaaggcaagattaacgatgaggacaaacagaagattctggacaagtgtaatgaaattatcaactggcttgataagaatcagactgctgagaaggaagaatttgaacatcaacagaaagagctggagaaagtttgcaaccccatcatcaccaagctgtaccagagtgcaggaggcatgccaggaggaatgcctgggggatttcctggtggtggagctcctccctctggtggtgcttcctcagggcccaccattgaagaggttgattaa

SEQ ID NO: 80 - DNA, 1086 bp, Homo sapiens
atgctcaagcgctgcggccggcgcctgctgctggcgctggcgggcgcgctgctcgcctgcctgctggtgctcaccgccgacccgccgccgcctccactgcccgccgagcgcggccggcgcgcgctgcgcagcctggcgggccccgcgggggctgccccggcgcccgggctgggggcggcggcggcggcgcccggggcgctggtccgcgacgtgcacagtctgtccgagtacttcagcctgctcacccgcgcgcgcagagatgcgggcccgccgcccggggctgccccccgccccgccgacggccacccgcgccccctggccgagccgctcgcgccccgagacgtcttcatcgctgtcaagaccaccaaaaagttccaccgcgcgcgcctcgacctgctgctggagacctggatctcgcgccacaaggagatgacgttcatcttcactgacggggaagatgaggccctggccaggcacacgggcaacgtggtcatcacaaactgctcggccgcccacagccgccaggcgctgtcctgcaagatggccgtggagtatgaccgcttcatcgagtccggcaggaagtggttctgccacgtggacgatgacaactacgtcaacctgcgggccctgctgcggctgctggccagctacccgcacacgcgggacgtctacgtcggcaagcccagcctggacaggcccatccaggccatggagcgggtcagcgagaacaaggtgcgtcctgtccacttctggtttgccacgggcggcgctggcttctgcatcagccgtgggctggctctgaagatgagcccgtgggccagcgggggtcacttcatgaatacggctgagcggatccggctgcctgatgactgcaccatcggctacatcgtggaggccctgctgggtgtgcccctcatccgcagcggcctcttccactcccacctggagaacctgcagcaggtgcccacctcggagctccacgagcaggtgacgctgagctacggtatgtttgaaaacaagcggaacgccgtccacgtgaaggggcccttctcggtggaggccgacccatccaggtggggaaactga

SEQ ID NO: 81 - DNA, 1809 bp, Homo sapiens
atgccctcggccaaacaaaggggctccaagggcggccacggcgccgcgagcccctcggagaagggtgcccacccgtcgggcggcgcggatgacgtggcgaagaagccgccgccggcgccgcagcagccgccgccgccgcccgcgccgcacccgcagcagcacccgcagcagcacccgcagaaccaggcgcacggcaagggcggccaccgcggcggcggcggcggcggcggcaagtcctcctcctcctcctccgcctccgccgccgctgccgccgccgccgcctcgtcctcggcgtcctgctcgcgcaggctcggcagggcgctcaactttctcttctacctcgccctggtggcggcggccgctttctcgggctggtgcgtccaccacgtcctggaggaggtccagcaggtccggcgcagccaccaggacttctcccggcagagggaggagctgggccagggcttgcagggcgtcgagcagaaggtgcagtctttgcaagccacatttggaacttttgagtccatcttgagaagctcccaacataaacaagacctcacagagaaagctgtgaagcaaggggagagtgaggtcagccggatcagcgaagtgctgcagaaactccagaatgagattctcaaagacctctcggatgggatccatgtggtgaaggacgcccgggagcgggacttcacgtccctggagaacacggtggaggagcggctgacggagctcaccaaatccatcaacgacaacatcgccatcttcacagaagtccagaagaggagccagaaggagatcaatgacatgaaggcaaaggttgcctccctggaagaatctgaggggaacaagcaggatttgaaagccttaaaggaagctgtgaaggagatacagacctcagccaagtccagagagtgggacatggaggccctgagaagtacccttcagactatggagtctgacatctacaccgaggtccgcgagctggtgagcctcaagcaggagcagcaggctttcaaggaggcggccgacacggagcggctcgccctgcaggccctcacggagaagcttctcaggtctgaggagtccgtctcccgcctcccggaggagatccggagactggaggaagagctccgccagctgaagtccgattcccacgggccgaaggaggacggaggcttcagacactcggaagcctttgaggcactccagcaaaagagtcagggactggactccaggctccagcacgtggaggatggggtgctctccatgcaggtggcttctgcgcgccagaccgagagcctggagtccctcctgtccaagagccaggagcacgagcagcgcctggccgccctgcaggggcgcctggaaggcctcgggtcctcagaggcagaccaggatggcctggccagcacggtgaggagcctgggcgagacccagctggtgctctacggtgacgtggaggagctgaagaggagtgtgggcgagctccccagcaccgtggaatcactccagaaggtgcaggagcaggtgcacacgctgctcagtcaggaccaagcccaggccgcccgtctgcctcctcaggacttcctggacagactttcttctctagacaacctgaaagcctcagtcagccaagtggaggcggacttgaaaatgctcaggactgctgtggacagtttggttgcatactcggtcaaaatagaaaccaacgagaacaatctggaatcagccaagggtttactagatgacctgaggaatgatctggataggttgtttgtgaaagtggagaagattcacgaaaaggtctaa

SEQ ID NO: 82 - DNA, 204 bp, Homo sapiens
atggataacgtgcagccgaaaataaaacatcgccccttctgcttcagtgtgaaaggccacgtgaagatgctgcggctggtgtttgcacttgtgacagcagtatgctgtcttgccgacggggcccttatttaccggaagcttctgttcaatcccagcggtccttaccagaaaaagcctgtgcatgaaaaaaaagaagttttgtaa

SEQ ID NO: 83 - DNA, 474 bp, Homo sapiens
atgcctgagctgatcctctctcctgccacagctcctcaccccctgaaaatgttcgcctgctccaagtttgtctccactccctccttggtcaagagcacctcacagctgctgagccgtccgctatctgcagtggtgctgaaacgaccggagatactgacagatgagagcctcagcagcttggcagtctcatgtccccttacctcacttgtctctagccgcagcttccaaaccagcgccatttcaagggacatcgacacagcagccaagttcattggagctggggctgccacagttggggtggctggttctggggctgggattggaactgtgtttgggagcctcatcattggttatgccaggaacccttctctgaagcaacagctcttctcctacgccattctgggctttgccctctcggaggccatggggctcttttgtctgatggtagcctttctcatcctctttgccatgtga

SEQ ID NO: 84 - DNA, 1284 bp, Homo sapiens
atggcagaacaggatgtggaaaacgatcttttggattacgatgaagaggaagagccccaggctcctcaagagagcacaccagctccccctaagaaagacatcaagggatcctacgtttccatccacagctctggcttccgggactttctgctgaagccggagctcctgcgggccatcgtggactgtggctttgagcatccttctgaggtccagcatgagtgcattccccaggccatcctgggcatggacgtcctgtgccaggccaagtccgggatgggcaagacagcggtcttcgtgctggccaccctacagcagattgagcctgtcaacggacaggtgacggtcctggtcatgtgccacacgagggagctggccttccagatcagcaaggaatatgagcgcttttccaagtacatgcccagcgtcaaggtgtctgtgttcttcggtggtctctccatcaagaaggatgaagaagtgttgaagaagaactgtccccatgtcgtggtggggaccccgggccgcatcctggcgctcgtgcggaataggagcttcagcctaaagaatgtgaagcactttgtgctggacgagtgtgacaagatgctggagcagctggacatgcggcgggatgtgcaggagatcttccgcctgacaccacacgagaagcagtgcatgatgttcagcgccaccctgagcaaggacatccggcctgtgtgcaggaagttcatgcaggatcccatggaggtgtttgtggacgacgagaccaagctcacgctgcacggcctgcagcagtactacgtcaaactcaaagacagtgagaagaaccgcaagctctttgatctcttggatgtgctggagtttaaccaggtgataatcttcgtcaagtcagtgcagcgctgcatggccctggcccagctcctcgtggagcagaacttcccggccatcgccatccaccggggcatggcccaggaggagcgcctgtcacgctatcagcagttcaaggatttccagcggcggatcctggtggccaccaatctgtttggccgggggatggacatcgagcgagtcaacatcgtctttaactacgacatgcctgaggactcggacacctacctgcaccgggtggcccgggcgggtcgctttggcaccaaaggcctagccatcacttttgtgtctgacgagaatgatgccaaaatcctcaatgacgtccaggaccggtttgaagttaatgtggcagaacttccagaggaaatcgacatctccacatacatcgagcagagccggtaa

SEQ ID NO: 85 - DNA, 372 bp, Homo sapiens
atggcctgccggtgcctcagcttccttctgatggggaccttcctgtcagtttcccagacagtcctggcccagctggatgcactgctggtcttcccaggccaagtggctcaactctcctgcacgctcagcccccagcacgtcaccatcagggactacggtgtgtcctggtaccagcagcgggcaggcagtgcccctcgatatctcctctactaccgctcggaggaggatcaccaccggcctgctgacatccccgatcgattctcggcagccaaggatgaggcccacaatgcctgtgtcctcaccattagtcccgtgcagcctgaagacgacgcggattactactgctctgttggctacggctttagtccctag

SEQ ID NO: 86 - DNA, 694 bp, Homo sapiens
ttcagaaaaagcggatggtggttcctgctgccctcaaggttgtgcgtctgaagcctgcaagaaagtttgcctatctggggcgcctggctcacgaggttggctggaagtaccaggcagtgacagccaccctggaggagaagaggaaagagaaagccaagatccactaccggaagaagaaacagttcatgaggctatggaaacaggccgagaagaacgtggagaagaaaattgacaaatacacagaagtcctcaagacccacggactcctggtctgagcccaataaagactgttaattcctcaaaaaaaaaaaaaaaaaaaaaagatcagtggttgagatattctgcagaccctgcacttgatggatcagctggcaccacccagatcaataaactggctcatctgatcttgtggcccccacccagaactgactctgaaagaagacggctccgacttcctacgatttcatctctaaccaatcagcactcctggctcactggcttcccctcatctgccaaattatccttaaaaattctgctccccaaatgctcagggaggctgatttgagtaagaataaaactccagtctcctgcacagctggctctgtgtgatttactctttctctattgcaatttccctgtcttgatgaattggtctgtctatgtagcgggcaaggtgaaccccttgagtggttac

SEQ ID NO: 87 - DNA, 1092 bp, Homo sapiens
atggcccagacgcccgccttcgacaagcccaaagtggaactgcatgtccacctagacggatccatcaagcctgaaaccatcttatactatggcaggaggagagggatcgccctcccagctaacacagcagaggggctgctgaacgtcattggcatggacaagccgctcacccttccagacttcctggccaagtttgactactacatgcctgctatcgcgggctgccgggaggctatcaaaaggatcgcctatgagtttgtagagatgaaggccaaagagggcgtggtgtatgtggaggtgcggtacagtccgcacctgctggccaactccaaagtggagccaatcccctggaaccaggctgaaggggacctcaccccagacgaggtggtggccctagtgggccagggcctgcaggagggggagcgagacttcggggtcaaggcccggtccatcctgtgctgcatgcgccaccagcccaactggtcccccaaggtggtggagctgtgtaagaagtaccagcagcagaccgtggtagccattgacctggctggagatgagaccatcccaggaagcagcctcttgcctggacatgtccaggcctaccaggaggctgtgaagagcggcattcaccgtactgtccacgccggggaggtgggctcggccgaagtagtaaaagaggctgtggacatactcaagacagagcggctgggacacggctaccacaccctggaagaccaggccctttataacaggctgcggcaggaaaacatgcacttcgagatctgcccctggtccagctacctcactggtgcctggaagccggacacggagcatgcagtcattcggctcaaaaatgaccaggctaactactcgctcaacacagatgacccgctcatcttcaagtccaccctggacactgattaccagatgaccaaacgggacatgggctttactgaagaggagtttaaaaggctgaacatcaatgcggccaaatctagtttcctcccagaagatgaaaagagggagcttctcgacctgctctataaagcctatgggatgccaccttcagcctctgcagggcagaacctctga

SEQ ID NO: 88 - DNA, 2376 bp, Homo sapiens
cgcgcggcccctgtcctccggcccgagatgaatcctgcggcagaagccgagttcaacatcctcctggccaccgactcctacaaggttactcactataaacaatatccacccaacacaagcaaagtttattcctactttgaatgccgtgaaaagaagacagaaaactccaaattaaggaaggtgaaatatgaggaaacagtattttatgggttgcagtacattcttaataagtacttaaaaggtaaagtagtaaccaaagagaaaatccaggaagccaaagatgtctacaaagaacatttccaagatgatgtctttaatgaaaagggatggaactacattcttgagaagtatgatgggcatcttccaatagaaataaaagctgttcctgagggctttgtcattcccagaggaaatgttctcttcacggtggaaaacacagatccagagtgttactggcttacaaattggattgagactattcttgttcagtcctggtatccaatcacagtggccacaaattctagagagcagaagaaaatattggccaaatatttgttagaaacttctggtaacttagatggtctggaatacaagttacatgattttggctacagaggagtctcttcccaagagactgctggcataggagcatctgctcacttggttaacttcaaaggaacagatacagtagcaggacttgctctaattaaaaaatattatggaacgaaagatcctgttccaggctattctgttccagcagcagaacacagtaccataacagcttgggggaaagaccatgaaaaagatgcttttgaacatattgtaacacagttttcatcagtgcctgtatctgtggtcagcgatagctatgacatttataatgcgtgtgagaaaatatggggtgaagatctaagacatttaatagtatcgagaagtacacaggcaccactaataatcagacctgattctggaaaccctcttgacactgtgttaaaggttttggagattttaggtaagaagtttcctgttactgagaactcaaagggttacaagttgctgccaccttatcttagagttattcaaggggatggagtagatattaataccttacaagagattgtagaaggcatgaaacaaaaaatgtggagtattgaaaatattgccttcggttctggtggaggtttgctacagaagttgacaagagatctcttgaattgttccttcaagtgtagctatgttgtaactaatggccttgggattaacgtcttcaaggacccagttgctgatcccaacaaaaggtccaaaaagggccgattatctttacataggacgccagcagggaattttgttacactggaggaaggaaaaggagaccttgaggaatatggtcaggatcttctccatactgtcttcaagaatggcaaggtgacaaaaagctattcatttgatgaaataagaaaaaatgcacagctgaatattgaactggaagcagcacatcattaggctttatgactgggtgtgtgttgtgtgtatgtaatacataatgtttattgtacagatgtgtggggtttgtgttttatgatacattacagccaaattatttgttggtttatggacatactgccctttcattttttttcttttccagtgtttaggtgatctcaaattaggaaatgcatttaaccatgtaaaagatgagtgctaaagtaagctttttagggccctttgccaataggtagtcattcaatctggtattgatcttttcacaaataacagaactgagaaacttttatatataactgatgatcacataaaacagatttgcataaaattaccatgattgctttatgtttatatttaacttgtatttttgtacaaacaagattgtgtaagatatatttgaagtttcagtgatttaacagtctttccaacttttcatgatttttatgagcacagactttcaagaaaatacttgaaaataaattacattgccttttgtccattaatcagcaaataaaacatggccttaacaaagttgtttgtgttattgtacaatttgaaaattatgtcgggacataccctatagaattactaaccttactgccccttgtagaatatgtattaatcattctacattaaagaaaataatggttcttactggaatgtctaggcactgtacagttattatatatcttggttgttgtattgtaccagtgaaatgccaaatttgaaaggcctgtactgcaattttatatgtcagagattgcctgtggctctaatatgcacctcaagattttaaggagataatgtttttagagagaatttctgcttccactatagaatatatacataaatgtaaaatacttacaaaagtgg

SEQ ID NO: 89 - DNA, 1270 bp, Homo sapiens
attttctaaaagggacagagagcaccctgctacatttcctaatcaagaagttggcgtgcagctgggagagctagactaagttggtcatgatgcagaagctactcaaatgcagtcggcttgtcctggctcttgccctcatcctggttctggaatcctcagttcaaggttatcctacgcggagagccaggtaccaatgggtgcgctgcaatccagacagtaattctgcaaactgccttgaagaaaaaggaccaatgttcgaactacttccaggtgaatccaacaagatcccccgtctgaggactgacctttttccaaagacgagaatccaggacttgaatcgtatcttcccactttctgaggactactctggatcaggcttcggctccggctccggctctggatcaggatctgggagtggcttcctaacggaaatggaacaggattaccaactagtagacgaaagtgatgctttccatgacaaccttaggtctcttgacaggaatctgccctcagacagccaggacttgggtcaacatggattagaagaggattttatgttataaaagaggattttcccaccttgacaccaggcaatgtagttagcatattttatgtaccatggttatatgattaatcttgggacaaagaattttatagaaatttttaaacatctgaaaaagaagcttaagttttatcatccttttttttctcatgaattcttaaaggattatgctttaatgctgttatctattttattgttcttgaaaatacctgcattttttggtatcatgttcaaccaacatcattatgaaattaattagattcccatggccataaaatggctttaaagaatatatatatatttttaaagtagcttgagaagcaaattggcaggtaatatttcatacctaaattaagactctgacttggattgtgaattataatgatatgccccttttcttataaaaacaaaaaaaaaaataatgaaacacagtgaatttgtagagtgggggtatttgacatattttacagggtggagtgtactatatactattacctttgaatgtgtttgcagagctagtggatgtgtttgtctacaagtatgattgctgttacataacaccccaaattaactcccaaattaaaacacagttgtgctgtcaatacctcatactgctttacctttttttcctggatatctgtgtattttcaaatgttactatatattaaagcagaaatataaccaaaggttaaaaaaaaaaaaaaaaaa

SEQ ID NO: 90 - DNA, 1185 bp, Homo sapiens
atggcggccgccagcggctacacggacctgcgtgagaagctcaagtccatgacgtcccgggacaactataaggcgggcagccgggaggccgccgccgctgccgcagccgccgtagccgccgcagccgcagccgccgctgccgccgaaccttaccctgtgtccggggccaagcgcaagtatcaggaggactcggaccccgagcgcagcgactatgaggagcagcagctgcagaaggaggaggaggcgcgcaaggtgaagagcggcatccgccagatgcgcctcttcagccaggacgagtgcgccaagatcgaggcccgcattgacgaggtggtgtcccgcgctgagaagggcctgtacaacgagcacacggtggaccgggccccactgcgcaacaagtacttcttcggcgaaggctacacttacggcgcccagctgcagaagcgcgggcccggccaggagcgcctctacccgccgggcgacgtggacgagatccccgagtgggtgcaccagctggtgatccaaaagctggtggagcaccgcgtcatccccgagggcttcgtcaacagcgccgtcatcaacgactaccagcccggcggctgcatcgtgtctcacgtggaccccatccacatcttcgagcgccccatcgtgtccgtgtccttctttagcgactctgcgctgtgcttcggctgcaagttccagttcaagcctattcgggtgtcggaaccagtgctttccctgccggtgcgcaggggaagcgtgactgtgctcagtggatatgctgctgatgaaatcactcactgcatacggcctcaggacatcaaggagcgccgagcagtcatcatcctcaggaagacaagattagatgcaccccggttggaaacaaagtccctgagcagctccgtgttaccacccagctatgcttcagatcgcctgtcaggaaacaacagggaccctgctctgaaacccaagcggtcccaccgcaaggcagaccctgatgctgcccacaggccacggatcctggagatggacaaggaagagaaccggcgctcggtgctgctgcccacacaccggcggaggggtagcttcagctctgagaactactggcgcaagtcatacgagtcctcagaggactgctctgaggcagcaggcagccctgcccgaaaggtgaagatgcggcggcactga

SEQ ID NO: 91 - DNA, 282 bp, Homo sapiens
atgttgaccgagctggagaaagccttgaactctatcatcgacgtctaccacaagtactccctgataaaggggaatttccatgccgtctacagggatgacctgaagaaattgctagagaccgagtgtcctcagtatatcaggaaaaagggtgcagacgtctggttcaaagagttggatatcaacactgatggtgcagttaacttccaggagttcctcattctggtgataaagatgggcgtggcagcccacaaaaaaagccatgaagaaagccacaaagagtag

SEQ ID NO: 92 - DNA, 1086 bp, Homo sapiens
atggcaggcggaagacaccggcgcgtcgtgggcaccctccacctgctgctgctggtggccgccctgccctgggcatccaggggggtcagtccgagtgcctcagcctggccagaggagaagaattaccaccagccagccattttgaattcatcggctcttcggcaaattgcagaaggcaccagtatctctgaaatgtggcaaaatgacttacagccattgctgatagagcgatacccgggatcccctggaagctatgctgctcgtcagcacatcatgcagcgaattcagaggcttcaggctgactgggtcttggaaatagacaccttcttgagtcagacaccctatgggtaccggtctttctcaaatatcatcagcaccctcaatcccactgctaaacgacatttggtcctcgcctgccactatgactccaagtatttttcccactggaacaacagagtgtttgtaggagccactgattcagccgtgccatgtgcaatgatgttggaacttgctcgtgccttagacaagaaactcctttccttaaagactgtttcagactccaagccagatttgtcactccagctgatcttctttgatggtgaagaggcttttcttcactggtctcctcaagattctctctatgggtctcgacacttagctgcaaagatggcatcgaccccgcacccacctggagcgagaggcaccagccaactgcatggcatggatttattggtcttattggatttgattggagctccaaacccaacgtttcccaatttttttccaaactcagccaggtggttcgaaagacttcaagcaattgaacatgaacttcatgaattgggtttgctcaaggatcactctttggaggggcggtatttccagaattacagttatggaggtgtgattcaggatgaccatattccatttttaagaagaggtgttccagttctgcatctgataccgtctcctttccctgaagtctggcacaccatggatgacaatgaagaaaatttggatgaatcaaccattgacaatctaaacaaaatcctacaagtctttgtgttggaatatcttcatttgtaa

SEQ ID NO: 93 - DNA, 1125 bp, Homo sapiens
cccccatgtgacagtgacggggtccccgctccaggagacgctcgagtctgcgtcccggccctcagcactgtccactgtttcggtgccagcagagaccagcaggcccgggacagttggtgtttggccgtgccgctgtctaacttggtgtgcagagtgaattgccgctgccggagcggagagaggcggagcggccaggagagaggggatttctgtcagcgccggcctcgggagctcggagacatgaacggcttcacgcctgacgagatgagccgcggcggggatgcggccgccgcagtggccgcagtggtcgctgccgcggccgccgccgcctcggcggggaacgggaccggcgcgggcaccggggctgaggtgccgggcgcgggggcggtctcagcggctgggcccccgggggcggccgggccgggccccgggcaactgtgctgcctgcgggaggatggtgagcggtgcggccgggcggcaggcaacgccagcttcagcaagaggatccagaagagcatctcccagaagaaggtgaagatcgagctggataagagcgcaaggcatctttacatatgtgattatcataaaaacttaattcagagtgttcgaaacagaagaaagagaaaagggagtgatgatgatggaggtgattcacctgttcaagatattgataccccagaggttgatttataccaattacaagtaaatacacttaggagatacaaaagacacttcaagctaccaaccagaccaggacttaataaagcacaacttgttgagatagttggttgccactttaggtctattccagtgaatgaaaaagacaccttaacatatttcatctactcagtgaagaatgacaagaacaaatcagatctcaaggttgatagtggtgttcactaggagacgtggaattgagactaataacttggatgttaacactgtttactgttttttcacatgtagaaatgttctttgtgtattttttctacagaggattttctctgattttattttctttgtttctgactctaataattagttggaaactcatataaaatgagctttcctaaattaaatctattttaaataaaggttattactattaaaaaaaaaaaaaaaaaa

SEQ ID NO: 94 - DNA, 987 bp, Homo sapiens
atggcggcggggatagtggcttctcgcagactccgcgacctactgacccggcgactgacaggctccaactacccgggactcagtattagccttcgcctcactggctcctctgcacaagaggaggcttccggagtagccctcggtgaagccccagaccacagctatgagtcccttcgtgtgacgtctgcgcagaaacatgttctgcatgtccagctcaaccggcccaacaagaggaatgccatgaacaaggtcttctggagagagatggtagagtgcttcaacaagatttcgagagacgctgactgtcgggcggtggtgatctctggtgcaggaaaaatgttcactgcaggtattgacctgatggacatggcttcggacatcctgcagcccaaaggagatgatgtggcccggatcagctggtacctccgtgacatcatcactcgataccaggagaccttcaacgtcatcgagaggtgccccaagcccgtgattgctgccgtccatgggggctgcattggcggaggtgtggaccttgtcaccgcctgtgacatccggtactgtgcccaggatgctttcttccaggtgaaggaggtggacgtgggtttggctgccgatgtaggaacactgcagcgcctgcccaaggtcatcgggaaccagagcctggtcaacgagctggccttcaccgcccgcaagatgatggctgacgaggccctgggcagtgggctggtcagccgggtgttcccagacaaagaggtcatgctggatgctgccttagcgctggcggccgagatttccagcaagagccccgtggcggtgcagagcaccaaggtcaacctgctgtattcccgcgaccattcggtggccgagagcctcaactacgtggcgtcctggaacatgagcatgctgcagacccaagacctcgtgaagtcggtccaggccacgactgagaacaaggaactgaaaaccgtcaccttctccaagctctga

SEQ ID NO: 95 - DNA, 1221 bp, Homo sapiens
atgtctgcgagccaggattcccgatccagagacaatggccccgatgggatggagcccgaaggcgtcatcgagagtaactggaatgagattgttgacagctttgatgacatgaacctctcggagtcccttctccgtggcatctacgcgtatggttttgagaagccctctgccatccagcagcgagccattctaccttgtatcaagggttatgatgtgattgctcaagcccaatctgggactgggaaaacggccacatttgccatatcgattctgcagcagattgaattagatctaaaagccacccaggccttggtcctagcacccactcgagaattggctcagcagatacagaaggtggtcatggcactaggagactacatgggcgcctcctgtcacgcctgtatcgggggcaccaacgtgcgtgctgaggtgcagaaactgcagatggaagctccccacatcatcgtgggtacccctggccgtgtgtttgatatgcttaaccggagatacctgtcccccaaatacatcaagatgtttgtactggatgaagctgacgaaatgttaagccgtggattcaaggaccagatctatgacatattccaaaagctcaacagcaacacccaggtagttttgctgtcagccacaatgccttctgatgtgcttgaggtgaccaagaagttcatgagggaccccattcggattcttgtcaagaaggaagagttgaccctggagggtatccgccagttctacatcaacgtggaacgagaggagtggaagctggacacactatgtgacttgtatgaaaccctgaccatcacccaggcagtcatcttcatcaacacccggaggaaggtggactggctcaccgagaagatgcatgctcgagatttcactgtatccgccatgcatggagatatggaccaaaaggaacgagacgtgattatgagggagtttcgttctggctctagcagagttttgattaccactgacctgctggccagaggcattgatgtgcagcaggtttctttagtcatcaactatgaccttcccaccaacagggaaaactatatccacagaatcggtcgaggtggacggtttggccgtaaaggtgtggctattaacatggtgacagaagaagacaagaggactcttcgagacattgagaccttctacaacacctccattgaggaaatgcccctcaatgttgctgacctcatctga

SEQ ID NO: 96 - DNA, 1108 bp, Homo sapiens
atgatggctgcctgtgacccccgccacggccgatacctcaccgtggctgctgtcttccatggtcggatatccatgaaggaggtcgatgagcagatgcttaacgtgcagaacaagaacagcagctactttgtggaatggatccccaacaacgtcaagacagctgtctgtgacatcccacctcgtggcctcaagatggcagtcaccttcattggcaatagctcggccatccaggagctcttcaagcgcatcttggagcagttcactgccatgttcggcaggaaggccttcctccactggtacacaggcgagggcatggactagatggagttcaccgaggctgagagcaacgtgaacgacctcgtctctgagtatcagagtaccaggatgccaccgcagaagaggaggaggattttgttgaggaggccgaagacgaggcctatgacagagcccccatcacctcaggcttttcagttcccttagccatcttactcaactgcccctttcctctccctcagaatttgtgtttgctgcctctatcttgttttttgttttttcttctgggggggtctagaacagtgcctggcacatagtaggcactcaataaatacttgtttgttgaatgtctcctctctctttccactctgggaaacctaggtttctgccattctgggtgaccctgtatttccttctggtgcccattccttccatctgtccagttaatatttctctcttaaaaatctccaagaagctgggtctcatccagatgccatttagaaccaaccaggtgctgaaaacccatgtagataatggtcaccatcctaagcccaaagtagaagatggtagaaggcagtgggtagaagtcactatataaggaaggggatgggattttccattctaaaagttttggagagggaaatccaggctattaaagtcactaatttctaagtatgtccatttcccatctcagcttcaagagagatgtcagcagtattatctccactttcaatctccctctaagctctactctttggaggggtctgtcccactctgtcaagtggaatcctttcctttccaactctacctccctcactcgagctcctttcccctg

SEQ ID NO: 97 - DNA, 633 bp, Homo sapiens
atgcgctgcctgaccacgcctatgctgctgcgggccctggcccaggctgcacgtgcaggacctcctggtggccggagcctccacagcagtgcagtggcagccacctacaagtatgtgaacatgcaggatcccgagatggacatgaagtcagtgactgaccgggcagcccgcaccctgctgtggactgagctcttccgaggcctgggcatgaccctgagctacctgttccgggaaccggccaccatcaactacccgttcgagaagggcccgctgagccctcgcttccgtggggagcatgcgctgcgccggtacccatccggggaggagcgttgcattgcctgcaagctctgcgaggccatctgccccgcccaggccatcaccatcgaggctgagccaagagctgatggcagccgccggaccacccgctatgacatcgacatgaccaagtgcatctactgcggcttctgccaggaggcctgtcccgtggatgccatcgtcgagggccccaactttgagttctccacggagacccatgaggagctgctgtacaacaaggagaagttgctcaacaacggggacaagtgggaggccgagatcgccgccaacatccaggctgactacttgtatcggtga

SEQ ID NO: 98 - DNA, 1152 bp, Homo sapiens
atggcggcattgagcggagtccgctggctgacccgagcgctggtctccgccgggaaccctggggcatggagaggtctgagtacctcggccgcggcgcacgctgcatcgcggagccaggccgaggacgtgagggtggagggctcctttcccgtgaccatgcttccgggagacggtgtggggcctgagctgatgcacgccgtcaaggaggtgttcaaggctgccgctgtcccagtggagttccaggagcaccacctgagtgaggtgcagaatatggcatctgaggagaagctggagcaggtgctgagttccatgaaggagaacaaagtggccatcattggaaagattcataccccgatggagtataagggggagctagcctcctatgatatgcggctgaggcgtaagttggacttatttgccaacgtagtccatgtgaagtcacttcctgggtatatgactcggcacaacaatctagacctggtgatcattcgagagcagacagaaggggagtacagctctctggaacatgagagtgcaaggggtgtgattgagtgtttgaagattgtcacacgagccaagtctcagcggattgcaaagttcgcctttgactatgccaccaagaaggggcggggcaaggtcactgctgtccacaaggccaacatcatgaaacttggggatgggttgttcctgcagtgctgtgaggaagttgctgaactgtaccccaaaatcaaatttgagacaatgatcatagacaactgctgcatgcagctggtgcagaatccttaccagtttgatgtgcttgtgatgcccaatctctatgggaacattattgacaatctggctgctggcctggttgggggagctggtgtggtccctggtgagagctatagtgcagaatacgcagtctttgagacgggtgcccggcacccatttgcccaggcagtgggcaggaatatagccaatcccacggccatgctgctgtcggcttccaacatgctgcggcatcttaatcttgagtatcactccagcatgatcgcagatgcggtgaagaaggtgatcaaagttggcaaggttcgaacctctgacatgggtggctatgctacttgccatgacttcactgaggctgtcattgctgccttgccccacccatag

SEQ ID NO: 99 - DNA, 1686 bp, Homo sapiens
atgtcaacctcctggagtgatcggttacagaatgcagcagatatgcctgctaacatggataagcatgccctgaaaaagtatcgtcgagaagcctatcatcgggtgtttgtgaaccgaagtttagcaatggaaaagataaagtgttttggttttgatatggattatacccttgctgtgtacaagtccccagagtatgagtcccttggttttgagcttactgtggagagattagtttctattggctatccccaggagttgctcagctttgcttatgattctacattccctaccaggggacttgtctttgacacactgtatggaaatcttttgaaagtcgatgcctatggaaacctcttggtctgtgcacatggatttaactttataaggggaccagaaactagagaacagtatccaaataaatttatccagcgagatgatactgaaagattttacattctgaacacactattcaacctaccagagacctacctgttggcctgcctagtagatttttttactaattgtcccagatataccagttgtgaaacaggatttaaagatggggacctcttcatgtcctaccggagtatgttccaggatgtaagagatgctgttgactgggttcattacaagggctcccttaaggaaaagacagttgaaaatcttgagaagtatgtagtcaaagatggaaaactgcctttgcttctgagccggatgaaggaagtagggaaagtatttcttgctaccaacagtgactataaatatacagataaaattatgacttacctgtttgacttcccacatggccccaagcctgggagctcccatcgaccatggcagtcctactttgacttgatcttggtggatgcacggaaaccactcttttttggagaaggcacagtactgcgtcaggtggatactaaaactggcaagctgaaaattggtacctacacagggcccctacagcatggtatcgtctactcaggaggttcttctgatacgatctgtgacctgttgggagccaagggaaaagacattttgtatattggagatcacatttttggggacattttaaaatcaaagaaacggcaagggtggcgaacttttttggtgattcctgaactcgcacaggagctacatgtctggactgacaagagttcacttttcgaagaacttcagagcttggatattttcttggctgaactctacaagcatcttgacagcagtagcaatgagcgtccagacatcagttccatccagagacgtattaagaaagtaactcatgacatggacatgtgctatgggatgatgggaagcctgtttcgcagtggctcccggcagaccctttttgccagtcaagtgatgcgttatgctgacctctatgcagcatctttcatcaacctgctgtattaccctttcagctacctcttcagggctgcccatgtcttgatgcctcatgaatcaacggtggagcacacacacgtagatatcaatgagatggagtctcctcttgccacccggaaccgcacatcagtggatttcaaagacactgactacaagcggcaccagctgacacggtcaattagtgagattaaacctcccaacctcttcccactggccccccaggaaattacacactgccatgacgaagatgatgatgaagaggaggaggaggaggaagaataa

SEQ ID NO: 100 - DNA, 948 bp, Homo sapiens
atgccggagctgctggtgtttcccgcccagacagatctgcatgaacacccactgtaccgggccggacacctcattctgcaggacagggccagctgtctcccagccatgctgctggacccccgccaggctcccatgtcatggatgcctgtgccaccccaggcaataaagaccagtcacttggctgctcttctgaagaaccaagggaagatctttgcctttgacctggatgccaggcggctggcatccatggccacgctgctggcctgggctggcgtctcctgctgtgagctggctgaggaggacttcctggcggtctcccccttagatccgcgctatcgtgaggtccactatgtcctgctggatccttcctgcagtggctcgggtatgccgagcagacagctggaggagcccggggcagggacacctagcccggtgcgtctgcatgccctggcagggttccagcagcgagccctgtgccacgcgctcactttcccttccctgcagcggctcgtctactccatgtgctccctctgccaggaggagaatgaagacatggtacaagatgcgctgcagcagaacccgggcgccttcaggctagctcccgccctgcctgcccggccccaccgaggcctgagcacgttcccgggtgccgagcactgcctccgggcttcccccaagaccacgcttagcggtggcttcttcgttgctgtaattgaacgggtcgagatgccgacctcagcctcacaggccaaagcatcagcaccagaacgcacacccagcccagccccaaagagaaagaagagagcaaaaagctgcagccggtgcttgcacaccgccttgcacatagcagaggctccgggctcactccttcctggtgggaaaggaagatgcctgtcctctccgtggaagaccctgggccctcaccgcaggcagcagtttgcgttttga

SEQ ID NO: 101 - DNA, 1374 bp, Homo sapiens
atggattccttcaaagtagtgctggaggggccagcaccttggggcttccggctgcaagggggcaaggacttcaatgtgcccctctccatttcccggctcactcctgggggcaaagcggcgcaggccggagtggccgtgggtgactgggtgctgagcatcgatggcgagaatgcgggtagcctcacacacatcgaagctcagaacaagatccgggcctgcggggagcgcctcagcctgggcctcagcagggcccagccggttcagagcaaaccgcagaaggcctccgcccccgccgcggaccctccgcggtacacctttgcacccagcgtctccctcaacaagacggcccggccctttggggcgcccccgcccgctgacagcgccccgcagcagaatggacagccgctccgaccgctggtcccagatgccagcaagcagcggctgatggagaacacagaggactggcggccgcggccggggacaggccagtcgcgttccttccgcatccttgcccacctcacaggcaccgagttcatgcaagacccggatgaggagcacctgaagaaatcaagccaggtgcccaggacagaagccccagccccagcctcatctacaccccaggagccctggcctggccctaccgcccccagccctaccagccgcccgccctgggctgtggaccctgcgtttgccgagcgctatgccccggacaaaacgagcacagtgctgacccggcacagccagccggccacgcccacgccgctgcagagccgcacctccattgtgcaggcagctgccggaggggtgccaggagggggcagcaacaacggcaagactcccgtgtgtcaccagtgccacaaggtcatccggggccgctacctggtggcgctgggccacgcgtaccacccggaggagtttgtgtgtagccagtgtgggaaggtcctggaagagggtggcttctttgaggagaagggcgccatcttctgcccaccatgctatgacgtgcgctatgcacccagctgtgccaagtgcaagaagaagattacaggcgagatcatgcacgccctgaagatgacctggcacgtgcactgctttacctgtgctgcctgcaagacgcccatccggaacagggccttctacatggaggagggcgtgccctattgcgagcgagactatgagaagatgtttggcacgaaatgccatggctgtgacttcaagatcgacgctggggaccgcttcctggaggccctgggcttcagctggcatgacacctgcttcgtctgtgcgatatgtcagatcaacctggaaggaaagaccttctactccaagaaggacaggcctctctgcaagagccatgccttctctcatgtgtga

SEQ ID NO: 102 - DNA, 1251 bp, Homo sapiens
atgagcgaggcggacgggctgcgacagcgccggcccctgcggccgcaggtcgtcacagacgatgatggccaggccccggaggctaaggacggcagctcctttagcggcagagttttccgagtgaccttcttgatgctggctgtttctctcaccgttcccctgcttggagccatgatgctgctggaatctcctatagatccacagcctctcagcttcaaagaacccccgctcttgcttggtgttctgcatccaaatacgaagctgcgacaggcagaaaggctgtttgaaaatcaacttgttggaccggagtccatagcacatattggggatgtgatgtttactgggacagcagatggccgggtcgtaaaacttgaaaatggtgaaatagagaccattgcccggtttggttcgggcccttgcaaaacccgagatgatgagcctgtgtgtgggagacccctgggtatccgtgcagggcccaatgggactctctttgtggccgatgcatacaagggactatttgaagtaaatccctggaaacgtgaagtgaaactgctgctgtcctccgagacacccattgaggggaagaacatgtcctttgtgaatgatcttacagtcactcaggatgggaggaagatttatttcaccgattctagcagcaaatggcaaagacgagactacctgcttctggtgatggagggcacagatgacgggcgcctgctggagtatgatactgtgaccagggaagtaaaagttttattggaccagctgcggttcccgaatggagtccagctgtctcctgcagaagactttgtcctggtggcagaaacaaccatggccaggatacgaagagtctacgtttctggcctgatgaagggcggggctgatctgtttgtggagaacatgcctggatttccagacaacatccggcccagcagctctggggggtactgggtgggcatgtcgaccatccgccctaaccctgggttttccatgctggatttcttatctgagagaccctggattaaaaggatgatttttaagctctttagtcaagagacggtgatgaagtttgtgccgcggtacagcctcgtcctagaactcagcgacagcggtgccttccggagaagcctgcatgatcccgatgggctggtggccacctacatcagcgaggtgcacgaacacgatgggcacctgtacctgggctctttcaggtcccccttcctctgcagactcagcctccaggctgtttag

SEQ ID NO: 103 - DNA, 390 bp, Homo sapiens
atgtctggtcgtggcaaacaaggaggcaaggcccgcgccaaggccaagtcgcgctcgtcccgcgctggcctccagttcccggtagggcgagtgcaccgcttgctgcgcaaaggcaactacgcggagcgggtgggggccggcgcgcccgtctacatggcggcggtcctcgagtacctgaccgccgagatcctggagctggcgggcaacgcggctcgggacaacaagaagacgcgcatcatccctcgtcacctccagctggccatccgcaacgacgaggaactgaacaagctgctgggcaaagtcaccatcgcccagggcggcgttttgcctaacatccaggccgttctgttaccaaagaaaaccgaaagccacaaagccaaaagcaaataa

SEQ ID NO: 104 - DNA, 534 bp, Homo sapiens
cgactttcccgatcgccaggcaggagtttctctcggtgactactatcgctgtcatgtctggtcgtggcaagcaaggaggcaaggcccgcgccaaggccaagtcgcgctcgtcccgcgctggccttcagttcccggtagggcgagtgcatcgcttgctgcgcaaaggcaactacgcggagcgagtgggggccggcgcgcccgtctacatggctgcggtcctcgagtatctgaccgccgagatcctggagctggcgggcaacgcggctcgggacaacaagaagacgcgcatcatccctcgtcacctccagctggccatccgcaacgacgaggaactgaacaagctgctgggcaaagtcaccatcgcccagggcggcgtcttgcctaacatccaggccgtactgctccctaagaagacggagagtcaccacaaggcaaagggcaagtgaggctgacgtccggcccaagtgggcccagcccggcccgcgtctcgaaggggcacctgtgaactcaaaaggctcttttcagagccaccca

SEQ ID NO: 105 - DNA, 3366 bp, Homo sapiens
atggacgctctcgaggactacgtttggccgcgggcaacctcggagcttatactcctcccagtgacgggtctggagtgcgtgggggaccggctgttggcgggtgagggtcccgatgtcctggtgtacagcttggactttggtgggcatctgcggatgataaagcgagtgcagaacctgcttggccactatcttatccatggcttccgggtacggccagagcctaatggagaccttgacttggaggccatggtggctgtgtttggaagcaagggactccgagttgtgaaaattagctggggacagggccacttctgggagctttggcgctctggcctgtggaacatgtctgactggatttgggatgcacgctggcttgagggaaatatagccttggccctgggccacaactcagtggtgctatatgaccctgtagtagggtgcatcctgcaagaggtgccctgcacagacaggtgcaccctctcttcagcctgcctgattggagacgcctggaaggagctgaccatagtggcaggtgctgtttccaaccagctcttggtctggtacccagcaactgccttagcagacaacaaacctgtagcacctgaccgacgaatcagtgggcatgtgggcatcatcttcagcatgtcatacctggaaagcaagggattgctggctacagcttcagaagaccgaagcgttcgtatctggaaggtgggcgacctgcgagtgcctgggggtcgggtgcagaatattgggcactgctttgggcacagcgcccgtgtgtggcaggtcaagcttctagagaattaccttatcagtgcaggagaggattgtgtctgcttggtgtggagccatgaaggtgagatcctccaggcctttcggggacaccagggacgtgggatccgggccatagctgcccatgagaggcaggcctgggtgatcactgggggtgatgactcaggcattcggctgtggcacttggtagggcgtgggtaccggggattgggggtctcggctctctgcttcaagtcccgtagtaggccaggtacactcaaggctgtgactctggctggctcttggcgactgctggcagtgactgatacaggggccctgtatctctatgacgtcgaggtcaagtgctgggagcagctgctagaggataaacatttccagtcctactgcctgctggaggcagctcctggtcccgagggcttcggattgtgtgctatggccaatggggaaggtcgtgtcaaggttgtccccatcaacactccaactgctgctgtggaccagaccctgtttcctgggaaggtgcacagcttgagctgggccctgcgtggttatgaggagctcctgttgctggcatcgggccctggcggggtagtagcttgcctagagatctcagccgcaccctctggcaaggccatctttgtcaaggaacgttgtcggtacctgctgcccccaagcaagcagagatggcacacatgcagtgccttcctacccccaggtgacttcctggtgtgtggtgaccgccggggctctgtgctgctattcccctccagaccaggtctgctcaaggaccctggggtgggaggcaaggctcgggctggtgctggggcacctgtagtgggtagtggtagtagtgggggtgggaatgctttcactgggttgggcccagtgtctaccctgccctctctgcacgggaagcagggtgtgacctcagtcacatgccatggtggctatgtgtataccacagggcgtgatggagcctactaccagctgtttgtacgagacggccagctccagccagtcctaaggcagaagtcctgtcgaggcatgaactggctagctgggctccgtatagtgcccgatgggagcatggttatcctgggtttccatgccaatgagtttgtggtgtggaaccctcggtcacacgagaagctgcacatcgtcaactgtggtggagggcaccgttcgtgggcattctctgatactgaggcggccatggcctttgcttacctcaaggatggggatgtcatgctgtacagggctctgggtggctgcacccggccacacgtgattctccgggagggtctgcatggccgtgagatcacttgtgtaaagcgtgtgggcaccattaccctggggcctgaatatggagtgcccagcttcatgcagcctgatgacctggagcctggcagtgaggggcccgacttgactgacattgtgatcacatgtagtgaggacactactgtctgtgtcctagcactccctacaaccacaggctcagcccacgcactcacagctgtttgtaaccatatctcctcggtacgtgctgtggctgtgtggggcattggcaccccaggtggccctcaggatcctcagccaggcctgactgcccatgtggtgtctgcgggggggcgggctgagatgcactgcttcagcatcatggttactccggaccccagcaccccaagccgcctcgcctgccatgtcatgcacctttcgtcccaccggctagatgagtattgggaccggcaacgcaatcggcatcggatggttaaggtagacccagagaccaggtacatgtcccttgctgtgtgtgaacttgaccagcccggccttggcccccttgtggctgcagcctgtagtgatggggccgtaaggctctttcttttgcaggattctgggcggattctgcagctccttgctgaaaccttccaccataagcgatgtgtcctcaaggtccactcctttacacacgaggcacccaaccagaggcggaggctcctcctgtgcagcgcagctactgatggcagcctggctttctgggatctcaccaccatgctagaccatgactccactgtcctggagcctccagtggatcctgggcttccctaccggcttggcaccccctccctgactctccaggcccacagctgtggtatcaacagcctgcacaccttgcccacccgtgagggccaccatctcgtggccagtggcagtgaagatggatccctccatgtcttcgtgcttgctgtggagatgctacagctagaagaggctgtgggagaggctgggctggtaccccagctgcgtgtgctagaggaatactctgtcccctgtgcacatgctgcccatgtgacaggcctcaagatcctaagcccaagcatcatggtctcagcctccattgatcaacggctgaccttctggcgtctggggcatggtgaacccaccttcatgaatagcactgtgttccatgtgcctgatgtggctgacatggactgctggcctgtgagccctgagtttggccaccgttgtgcccttgggggtcaggggcttgaggtttacaactggtatgactga

SEQ ID NO: 106 - DNA, 3876 bp, Homo sapiens
atggcgggcgccgcgtccccttgcgccaacggctgcgggcccggcgcgccctcggacgccgaggtgctgcacctctgccgcagcctcgaggtgggcaccgtcatgactttgttctactccaagaagtcgcagcgacccgagcggaagaccttccaggtcaagctggagacgcgccagatcacgtggagccggggcgccgacaagatcgagggggccattgacattcgtgaaattaaggagatccgcccagggaagacctcacgggactttgatcgctatcaagaggacccagctttccggccggaccagtcacattgctttgtcattctctatggaatggaatttcgcctgaaaacgctgagcctgcaagccacatctgaggatgaagtgaacatgtggatcaagggcttaacttggctgatggaggatacattgcaggcacccacacccctgcagattgagaggtggctccggaagcagttttactcagtggatcggaatcgtgaggatcgtatatcagccaaggacctgaagaacatgctgtcccaggtcaactaccgggtccccaacatgcgcttcctccgagagcggctgacggacctggagcagcgcagcggggacatcacctacgggcagtttgctcagctgtaccgcagcctcatgtacagcgcccagaagacgatggacctccccttcttggaagccagtactctgagggctggggagcggccggagctttgccgagtgtcccttcctgagttccagcagttccttcttgactaccagggggagctgtgggctgttgatcgcctccaggtgcaggagttcatgctcagcttcctccgagaccccttacgagagatcgaggagccatacttcttcctggatgagtttgtcaccttcctgttctccaaagagaacagtgtgtggaactcgcagctggatgcagtatgcccggacaccatgaacaaccctctttcccactactggatctcctcctcgcacaacacgtacctgaccggggaccagttctccagtgagtcctccttggaagcctatgctcgctgcctgcggatgggctgtcgctgcattgagttggactgctgggacggcccggatgggatgccagttatttaccatgggcacacccttaccaccaagatcaagttctcagatgtcctgcacaccatcaaggagcatgcctttgtggcctcagagtacccagtcatcctgtccattgaggaccactgcagcattgcccagcagagaaacatggcccaatacttcaagaaggtgctgggggacacactcctcaccaagcccgtggagatctctgccgacgggctcccctcacccaaccagcttaagaggaagatcctcatcaagcacaagaagctggctgagggcagtgcctacgaggaggtgcctacatccatgatgtactctgagaacgacatcagcaactctatcaagaatggcatcctctacctggaggaccctgtgaaccacgaatggtatccccactactttgttctgaccagcagcaagatctactactctgaggagaccagcagtgaccagggcaacgaggatgaggaggagcccaaggaggtcagcagcagcacagagctgcactccaatgagaagtggttccatgggaagctaggggcagggcgtgacgggcgtcacatcgctgagcgcctgcttactgagtactgcatcgagaccggagcccctgacggctccttcctcgtgcgagagagtgagaccttcgtgggcgactacacgctctctttctggcggaacgggaaagtccagcactgccgtatccactcccggcaagatgctgggacccccaagttcttcttgacagacaacctcgtctttgactccctctatgacctcatcacgcactaccagcaggtgcccctgcgctgtaatgagtttgagatgcgactttcagagcctgtcccacagaccaacgcccacgagagcaaagagtggtaccacgcgagcctgaccagagcacaggctgagcacatgctaatgcgcgtccctcgtgatggggccttcctggtgcggaagcggaatgaacccaactcatatgccatctctttccgggctgagggcaagatcaagcattgccgtgtccagcaagagggccagacagtgatgctagggaactcggagttcgacagccttgttgacctcatcagctactatgagaaacacccgctataccgcaagatgaagctgcgctatcccatcaacgaggaggcactggagaagattggcacagctgagcctgactacggggccctgtatgagggacgcaaccctggcttctatgtagaggcaaaccctatgccaactttcaagtgtgcagtcaaagccctctttgactacaaggcccagagggaggacgagctgaccttcatcaagagcgccatcatccagaatgtggagaagcaagagggaggctggtggcgaggggactacggagggaagaagcagctgtggttcccatcaaactacgtggaagagatggtcaaccccgtggccctggagccggagagggagcacttggacgagaacagccccctaggggacttgctgcggggggtcttggatgtgccggcttgtcagattgccatccgtcctgagggcaagaacaaccggctcttcgtcttctccatcagcatggcgtcggtggcccactggtccctggatgttgctgccgactcacaggaggagctgcaggactgggtgaaaaagatccgtgaagtggcccagacagcagacgccaggctcactgaagggaagataatggaacggaggaagaagattgccctggagctctctgaacttgtcgtctactgccggcctgttccctttgatgaagagaagattggcacagaacgtgcttgctaccgggacatgtcatccttcccggaaaccaaggctgagaaatacgtgaacaaggccaaaggcaagaagttccttcagtacaatcgactgcagctctcccgcatctaccccaagggccagcgactggattcctccaactacgatcctttgcccatgtggatctgtggcagtcagcttgtggccctcaacttccagacccctgacaagcctatgcagatgaaccaggccctcttcatgacgggcaggcactgtggctacgtgctgcagccaagcaccatgcgggatgaggccttcgacccctttgacaagagcagcctccgcgggctggagccatgtgccatctctattgaggtgctgggggcccgacatctgccaaagaatggccgaggcattgtgtgtccttttgtggagattgaggtggctggagctgagtatgacagcaccaagcagaagacagagtttgtggtggacaatggactcaaccctgtatggccagccaagcccttccacttccagatcagtaaccctgaatttgcctttctgcgcttcgtggtgtatgaggaagacatgtttagtgaccagaatttcctggctcaggctactttcccagtaaaaggcctgaagacaggatacagagcagtgcctttgaagaacaactacagtgaggacctggagttggcctccctgctgatcaagattgacattttccctgccaagcaggagaatggtgacctcagtcccttcagtggtacgtccctgcgggagcggggctcagatgcctcaggccagctgtttcatggccgagcccgggaaggctcctttgaatcccgctaccagcagccgtttgaggacttccgcatctcccaggagcatctcgcagaccattttgacagtcgagaacgaagggccccaagaaggactcgggtcaatggagacaaccgcctctag

SEQ ID NO: 107 - DNA, 4716 bp, Homo sapiens
gaagaactggaactggtctggccatagggggaagcggcgcgttaaatccgccccctctccataccctactttcaaggggtgggcggtagaggggaggttggggttggagcagcggcgagggggcccctcccttgcacctccccccaccggacttggtcgcgcccgaagtgtaacactttctctttgtcggaggagctcctctgtttcctgtgcagtagctcccgttgcggcggcacccgtggcagccctggcggacgcaggagcgatggcagcgaccgatatagctcgccaggtgggtgaaggttgccgaactgtccccctggctggacatgtggggtttgacagcttgcctgaccagctggtgaataagtccgtcagccagggcttctgcttcaacatcctgtgcgtgggagagacaggtttgggcaagtccaccctcatggacaccctgttcaacaccaaattcgaaggggagccagccacccacacacagccgggtgtccagctccagtctaatacctatgacctccaagagagcaacgtgaggctaaagctcacgatcgttagcacagttggctttggggaccagatcaacaaagaggacagctacaagcctatcgtggaattcatcgatgcacaattcgaggcctacctgcaggaagagctaaagatccgaagagtgctacacacctaccatgactcccgaatccatgtctgcttgtatttcattgcccccacgggtcattccctgaagtctctggacctagtgactatgaagaagctggacagtaaggtgaacatcatccccatcattgccaaagcagatgccatttcgaagagtgagctaacaaagttcaaaatcaaaatcaccagcgagcttgtcagcaacggagtccagatctatcagtttcctacagatgatgagtcggtggcagagatcaatggaaccatgaacgcccacctgccgtttgctgtcattggcagcacagaagaactgaagataggcaacaagatgatgagggcgcggcagtatccttggggcactgtgcaggttgaaaacgaggcccactgcgactttgtgaagctgcgggagatgctgattcgggtcaacatggaggatctgcgggagcagacccacacccggcactatgagctgtatcgccgctgtaagctggaggagatgggcttcaaggacaccgaccctgacagcaaacccttcagtttacaggagacatatgaggccaaaaggaacgagttcctaggggaactccagaaaaaagaagaggagatgagacagatgttcgtccagcgagtcaaagagaaagaagcggagctcaaagaggcagagaaagagctgcacgagaagtttgaccgtctgaagaaactgcaccaggacgagaagaagaaactggaggataagaagaaatccctggatgatgaagtgaatgctttcaagcaaagaaagacggcggctgagctgctccagtcccagggctcccaggctggaggctcacagactctgaagagagacaaagagaagaaaaattaactctgctgtttgctgcatgctgcatgagacccagggtcctgtttgggcttcctgtagacacccttttcctgcgcaacagagctgggcctccctttctctaatttcccccttaacatgcctggggggcatacaatccaacccgcgccctctcctctcttcctgccaaggtttatagaaacctgagaatctgagggtgatgtctggccgctggtcaagaagccaacagtcatgtggctcgcagatgcatcctgcatcccagtccccctcccagcacccccagccatcccccctgtcttcccccacatctttgccagaggtgtgacatggtcagggggcccatctgctactctttcccaccagctcccctgttccagttctggttgctgttagtttccctgaggtatttgcaaccaccatggctgggtaaccaccgatcagcacagctgtccccttggtctcctgtatcccagtcactagtcctccctggtccaccccaccctcatcctcaggagccacagccatttcttagagggtttcaaaaggacagcctttggcgccttttccttctaacctttgagtccagccctttccagttttcattcactcgaagtaactgcactcaagctgtgctcaaaatcggcaacgcatttatttacaccaagcccttcccataaaacacaactgctgaagaaaatagcagacgtttcccctctctctaactctgggtatcccacagatgcaaaagggagaataaacctgaatattattaccagcctagagtcttgaatgatagccttaccgaattcttcttgtgaggtatttcagcatctcggggggtaatttccggaagggctccatactgtcccaataaggtgaggccagtagcaggaataataaatcccactttgtaggctggaaaactgagctgtcaaaagaatcaagtgtttgggggtttgctctgatgagtcttctagttcatttggtgaatgtcatgatgatttttaacatgcattttgcatgcatcccccaataagaagagatgagactcggctggagagaagaaaaggcccttaactttctttccaatttaaggagttgagagtttaaaaatattccagccctaagtttttatcatgggtcccatctgatagtggctttgggaacctctgtgaagtagagagccctcccttgtcagggttatgaggcacagtggcctttggtgtttggccagtgacagtgtgagagatggagttgacctggcaatgatctgtggctaacatgccgtctctctgcccttcctttgcagtaatccatggctgtgtactgaatagtattccccgctacagctggactggactccatttagccttttaagccgaggttcctattttaactgacagctttcctttggggtgccaggcagcgaggccccccacccctatcctgccatgtacttcaagctcacttcttctttttgagttccgcaacttgctcctgcctcccagccccactggcactgaccatgaccacctacttctattttttttttagagtttctttttttgatcacttactttcaaagcacacagtcaaacaaggttatgccaaatttccaggcctttttgaagtattgagaaggggaaggggatttctcacttcaattatagatcataataggaagcaaaaagaaaaaaatgaaaagcaaacatatgcacgcacttttcttgttgacaaagcaagaatataggtttgctgtgtaggtttggtgctctattgattggtgagtgaccagagcaagtatgaaggtgatgctgccaaagcacaagccagtttcttgggaaaattcaagttacagtggagtatttttttgaagaccatatgcttggaggtagaaacaaaccaacgaccaaaaaaaaaaaaaaaaaaatctgctcagatactcagccagtagctcagagagatgctgagttaggcctgtcaggtctccttgggaaaggcttcatatttgcaactttgatgattctatgtccagcttcagagctgctttcccagaaattcacgcttaaacaaccaaccggtaaccaccacttccccacaccgccgcccggtaattatttgcattacaaaccggaggcgccctcatttgcatttgtgtacagattaactagttaaggcttgagaagctctgaataattcaaaagtattagacccacacagccttggagagaccttcagaaactaaggaggagttttatattaagggagacattttagtcagtaagacgatataacctacttactccgtaaggggaaatgaaggcccagagaagggaagggacttgaccgaggtcccacttctgtttcgaggcagaagccagactaattttcatgcctcctgactcccaatcagtttcacaaagggattcaatctgtttatatacgttacattcctggatacgaggtcttttgatgttcagagtaactgactagttagtattagaagaccctcgaggtttttttccacagaaaaacatctgaagatggattgggtgagggctggcaaaacgaaggcatgccgggccagctccttaacccaatgacccagtgatgctgcaaggctggaacggggtccaggagactgtgtgtaacaggtgccctaggtgacccttataatcagggaagtttggtgaacaaaaatcgaacccatgagtgaacataaattaaaaagttgatcaacctattaaaatgtgtatttcattgggtagcttttctcactgtagacagattttttccttcttcaatgaaaaggcttttaaattagtacaactgttactatttaaaaaaaaaataccctaagtactctgtttacttctggtgaaacaaaaccagtcattagaaatggtctgtgcttttattttcccagactggagtggcttttctgaaacacacacacacacacacacacacacacacacacacacacacacacacacgtacacacatccctcacttctcttaagccaagaagtttgctttccctagctgcagtgtagatggctcttgtttttgtttttttgttttaatcatttggcattcacatgtggctgttaatatgtgcttgtttttaattaaaacaagaagctttaaaaaaaaaaaaaaaaaaaaaa

SEQ ID NO: 108 - DNA, 345 bp, Homo sapiens
atgacttgcaaaatgtcgcagctggaacgcaacatagagaccatcatcaacaccttccaccaatactctgtgaagctggggcacccagacaccctgaaccagggggaattcaaagagctggtgcgaaaagatctgcaaaattttctcaagaaggagaataagaatgaaaaggtcatagaacacatcatggaggacctggacacaaatgcagacaagcagctgagcttcgaggagttcatcatgctgatggcgaggctaacctgggcctcccacgagaagatgcacgagggtgacgagggccctggccaccaccataagccaggcctcggggagggcaccccctaa

SEQ ID NO: 109 - DNA, 648 bp, Homo sapiens
atggggctagaaaaacctcaaagtaaactggaaggaggcatgcatccccagctgataccttcggttattgctgtagttttcatcttacttctcagtgtctgttttattgcaagttgtttggtgactcatcacaacttttcacgctgtaagagaggcacaggagtgcacaagttagagcaccatgcaaagctcaaatgcatcaaagagaaatcagaactgaaaagtgctgaagggagcacctggaactgttgtcctattgactggagagccttccagtccaactgctattttcctcttactgacaacaagacgtgggctgagagtgaaaggaactgttcagggatgggggcccatctgatgaccatcagcacggaagctgagcagaactttattattcagtttctggatagacggctttcctatttccttggacttagagatgagaatgccaaaggtcagtggcgttgggtggaccagacgccatttaacccacgcagagtattctggcataagaatgaacccgacaactctcagggagaaaactgtgttgttcttgtttataaccaagataaatgggcctggaatgatgttccttgtaactttgaagcaagtaggatttgtaaaatacctggaacaacattgaactag

SEQ ID NO: 110 - DNA, 618 bp, Homo sapiens
cttttgcgggtggcggcgaacgcggagagcacgccatgaaggcctcgggcacgctacgagagtacaaggtagtgggtcgctgcctgcccacccccaaatgccacacgccgcccctctaccgcatgcgaatctttgcgcctaatcatgtcgtcgccaagtcccgcttctggtactttgtatctcagttaaagaagatgaagaagtcttcaggggagattgtctactgtgggcaggtgtttgagaagtcccccctgcgggtgaagaacttcgggatctggctgcgctatgactcccggagcggcacccacaacatgtaccgggaataccgggacctgaccaccgcaggcgctgtcacccagtgctaccgagacatgggtgcccggcaccgcgcccgagcccactccattcagatcatgaaggtggaggagatcgcggccagcaagtgccgccggccggctgtcaagcagttccacgactccaagatcaagttcccgctgccccaccgggtcctgcgccgtcagcacaagccacgcttcaccaccaagaggcccaacaccttcttctaggtgcagggccctcgtccgggtgtgccccaaataaactcaggaacgccccggt

SEQ ID NO: 111 - DNA, 633 bp, Homo sapiens
atgccgccctacaccgtggtctatttcccagttcgaggccgctgcgcggccctgcgcatgctgctggcagatcagggccagagctggaaggaggaggtggtgaccgtggagacgtggcaggagggctcactcaaagcctcctgcctatacgggcagctccccaagttccaggacggagacctcaccctgtaccagtccaataccatcctgcgtcacctgggccgcacccttgggctctatgggaaggaccagcaggaggcagccctggtggacatggtgaatgacggcgtggaggacctccgctgcaaatacatctccctcatctacaccaactatgaggcgggcaaggatgactatgtgaaggcactgcccgggcaactgaagccttttgagaccctgctgtcccagaaccagggaggcaagaccttcattgtgggagaccagatctccttcgctgactacaacctgctggacttgctgctgatccatgaggtcctagcccctggctgcctggatgcgttccccctgctctcagcatatgtggggcgcctcagtgcccggcccaagctcaaggccttcctggcctcccctgagtacgtgaacctccccatcaatggcaacgggaaacagtga

SEQ ID NO: 112 - DNA, 2253 bp, Homo sapiens
atgggcaagtcagaaagtcagatggatataactgatatcaacactccaaagccaaagaagaaacagcgatggactccactggagatcagcctctcggtccttgtcctgctcctcaccatcatagctgtgacaatgatcgcactctatgcaacctacgatgatggtatttgcaagtcatcagactgcataaaatcagctgctcgactgatccaaaacatggatgccaccactgagccttgtacagactttttcaaatatgcttgcggaggctggttgaaacgtaatgtcattcccgagaccagctcccgttacggcaactttgacattttaagagatgaactagaagtcgttttgaaagatgtccttcaagaacccaaaactgaagatatagtagcagtgcagaaagcaaaagcattgtacaggtcttgtataaatgaatctgctattgatagcagaggtggagaacctctactcaaactgttaccagacatatatgggtggccagtagcaacagaaaactgggagcaaaaatatggtgcttcttggacagctgaaaaagctattgcacaactgaattctaaatatgggaaaaaagtccttattaatttgtttgttggcactgatgataagaattctgtgaatcatgtaattcatattgaccaacctcgacttggcctcccttctagagattactatgaatgcactggaatctataaagaggcttgtacagcatatgtggattttatgatttctgtggccagattgattcgtcaggaagaaagattgcccatcgatgaaaaccagcttgctttggaaatgaataaagttatggaattggaaaaagaaattgccaatgctacggctaaacctgaagatcgaaatgatccaatgcttctgtataacaagatgacattggcccagatccaaaataacttttcactagagatcaatgggaagccattcagctggttgaatttcacaaatgaaatcatgtcaactgtgaatattagtattacaaatgaggaagatgtggttgtttatgctccagaatatttaaccaaacttaagcccattcttaccaaatattctgccagagatcttcaaaatttaatgtcctggagattcataatggatcttgtaagcagcctcagccgaacctacaaggagtccagaaatgctttccgcaaggccctttatggtacaacctcagaaacagcaacttggagacgttgtgcaaactatgtcaatgggaatatggaaaatgctgtggggaggctttatgtggaagcagcatttgctggagagagtaaacatgtggtcgaggatttgattgcacagatccgagaagtttttattcagactttagatgacctcacttggatggatgccgagacaaaaaagagagctgaagaaaaggccttagcaattaaagaaaggatcggctatcctgatgacattgtttcaaatgataacaaactgaataatgagtacctcgagttgaactacaaagaagatgaatacttcgagaacataattcaaaatttgaaattcagccaaagtaaacaactgaagaagctccgagaaaaggtggacaaagatgagtggataagtggagcagctgtagtcaatgcattttactcttcaggaagaaatcagatagtcttcccagccggcattctgcagccccccttctttagtgcccagcagtccaactcattgaactatgggggcatcggcatggtcataggacacgaaatcacccatggcttcgatgacaatggcagaaactttaacaaagatggagacctcgttgactggtggactcaacagtctgcaagtaactttaaggagcaatcccagtgcatggtgtatcagtatggaaacttttcctgggacctggcaggtggacagcaccttaatggaattaatacactgggagaaaacattgctgataatggaggtcttggtcaagcatacagagcctatcagaattatattaaaaagaatggcgaagaaaaattacttcctggacttgacctaaatcacaaacaactatttttcttgaactttgcacaggtgtggtgtggaacctataggccagagtatgcggttaactccattaaaacagatgtgcacagtccaggcaatttcaggattattgggactttgcagaactctgcagagttttcagaagcctttcactgccgcaagaattcatacatgaatccagaaaagaagtgccgggtttggtga

SEQ ID NO: 113 - DNA, 1146 bp, Homo sapiens
atgaccgtcgcgcggccgagcgtgcccgcggcgctgcccctcctcggggagctgccccggctgctgctgctggtgctgttgtgcctgccggccgtgtggggtgactgtggccttcccccagatgtacctaatgcccagccagctttggaaggccgtacaagttttcccgaggatactgtaataacgtacaaatgtgaagaaagctttgtgaaaattcctggcgagaaggactcagtgatctgccttaagggcagtcaatggtcagatattgaagagttctgcaatcgtagctgcgaggtgccaacaaggctaaattctgcatccctcaaacagccttatatcactcagaattattttccagtcggtactgttgtggaatatgagtgccgtccaggttacagaagagaaccttctctatcaccaaaactaacttgccttcagaatttaaaatggtccacagcagtcgaattttgtaaaaagaaatcatgccctaatccgggagaaatacgaaatggtcagattgatgtaccaggtggcatattatttggtgcaaccatctccttctcatgtaacacagggtacaaattatttggctcgacttctagtttttgtcttatttcaggcagctctgtccagtggagtgacccgttgccagagtgcagagaaatttattgtccagcaccaccacaaattgacaatggaataattcaaggggaacgtgaccattatggatatagacagtctgtaacgtatgcatgtaataaaggattcaccatgattggagagcactctatttattgtactgtgaataatgatgaaggagagtggagtggcccaccacctgaatgcagaggaaaatctctaacttccaaggtcccaccaacagttcagaaacctaccacagtaaatgttccaactacagaagtctcaccaacttctcagaaaaccaccacaaaaaccaccacaccaaatgctcaagcaacacggagtacacctgtttccaggacaaccaagcattttcatgaaacaaccccaaataaaggaagtggaaccacttcaggtactacccgtcttctatctgggcacacgtgtttcacgttgacaggtttgcttgggacgctagtaaccatgggcttgctgacttag

SEQ ID NO: 114 - DNA, 855 bp, Homo sapiens
atggacgccatcaagaagaagatgcagatgctgaagctggacaaggagaacgccatcgaccgcgccgagcaggccgaagccgacaagaagcaagctgaggaccgctgcaagcagctggaggaggagcagcaggccctccagaagaagctgaaggggacagaggatgaggtggaaaagtattctgaatccgtgaaggaggcccaggagaaactggagcaggccgagaagaaggccactgatgctgaggcagatgtggcctccctgaaccgccgcattcagctggttgaggaggagctggaccgggcccaggagcgcctggctacagccctgcagaagctggaggaggccgagaaggcggctgatgagagcgagagaggaatgaaggtcatcgaaaaccgggccatgaaggatgaggagaagatggaactgcaggagatgcagctgaaggaggccaagcacatcgctgaggattcagaccgcaaatatgaagaggtggccaggaagctggtgatcctggaaggagagctggagcgctcggaggagagggctgaggtggccgagagccgagccagacagctggaggaggaacttcgaaccatggaccaggccctcaagtccctgatggcctcagaggaggagtattccaccaaagaagataaatatgaagaggagatcaaactgttggaggagaagctgaaggaggctgagacccgagcagagtttgccgagaggtctgtggcaaagttggagaaaaccatcgatgacctagaagagaccttggccagtgccaaggaggagaacgtcgagattcaccagaccttggaccagaccctgctggaactcaacaacctgtga

SEQ ID NO: 115 - DNA, 3423 bp, Homo sapiens
atgtcgtacaactacgtggtaacggcccagaagcccaccgccgtgaacggctgcgtgaccggacactttacttcggccgaagacttaaacctgttgattgccaaaaacacgagattagagatctatgtggtcaccgccgaggggcttcggcccgtcaaagaggtgggcatgtatgggaagattgcggtcatggagcttttcaggcccaagggggagagcaaggacctgctgtttatcttgacagcgaagtacaatgcctgcatcctggagtataaacagagtggcgagagcattgacatcattacgcgagcccatggcaatgtccaggaccgcattggccgcccctcagagaccggcattattggcatcattgaccctgagtgccggatgattggcctgcgtctctatgatggccttttcaaggttattccactagatcgcgataataaagaactcaaggccttcaacatccgcctggaggagctgcatgtcattgatgtcaagttcctatatggttgccaagcacctactatttgctttgtctaccaggaccctcaggggcggcacgtaaaaacctatgaggtgtctctccgagaaaaggaattcaataagggcccttggaaacaggaaaatgtcgaagctgaagcttccatggtgatcgcagtcccagagccctttgggggggccatcatcattggacaggagtcaatcacctatcacaatggtgacaaatacctggctattgcccctcctatcatcaagcaaagcacgattgtgtgccacaatcgagtggaccctaatggctcaagatacctgctgggagacatggaaggccggctcttcatgctgcttttggagaaggaggaacagatggatggcaccgtcactctcaaggatctccgtgtagaactccttggagagacctctattgctgagtgcttgacataccttgataatggtgttgtgtttgtcgggtctcgcctgggtgactcccagcttgtgaagctcaacgttgacagtaatgaacaaggctcctatgtagtggccatggaaacctttaccaacttaggacccattgtcgatatgtgcgtggtggacctggagaggcaggggcaggggcagctggtcacttgctctggggctttcaaggaaggttctttgcggatcatccggaatggaattggaatccacgagcatgccagcattgacttaccaggcatcaaaggattatggccactgcggtctgaccctaatcgtgagactgatgacactttggtgctctcttttgtgggccagacaagagttctcatgttaaatggagaggaggtagaagaaaccgaactgatgggtttcgtggatgatcagcagactttcttctgtggcaacgtggctcatcagcagcttatccagatcacttcagcatcggtgaggttggtctctcaagaacccaaagctctggtcagtgaatggaaggagcctcaggccaagaacatcagtgtggcctcctgcaatagcagccaggtggtggtggctgtaggcagggccctctactatctgcagatccatcctcaggagctccggcagatcagccacacagagatggaacatgaagtggcttgcttggacatcaccccattaggagacagcaatggactgtcccctctttgtgccattggcctctggacggacatctcggctcgtatcttgaagttgccctcttttgaactactgcacaaggagatgctgggtggagagatcattcctcgctccatcctgatgaccacctttgagagtagccattacctcctttgtgccttgggagatggagcgcttttctactttgggctcaacattgagacaggtctgttgagcgaccgtaagaaggtgactttgggcacccagcccaccgtattgaggacttttcgttctctttctaccaccaacgtctttgcttgttctgaccgccccactgtcatctatagcagcaaccacaaattggtcttctcaaatgtcaacctcaaggaagtgaactacatgtgtcccctcaattcagatggctatcctgacagcctggcgctggccaacaatagcaccctcaccattggcaccatcgatgagatccagaagctgcacattcgcacagttcccctctatgagtctccaaggaagatctgctaccaggaagtgtcccagtgtttcggggtcctctccagccgcattgaagtccaagacacgagtgggggcacgacagccttgaggcccagcgctagcacccaggctctgtccagcagtgtaagctccagcaagctgttctccagcagcactgctcctcatgagacctcctttggagaagaggtggaggtgcacaacctacttatcattgaccaacacacctttgaagtgcttcatgcccaccagtttctgcagaatgaatatgccctcagtctggtttcctgcaagctgggcaaagaccccaacacttacttcattgtgggcacagcaatggtgtatcctgaagaggcagagcccaagcagggtcgcattgtggtctttcagtattcggatggaaaactacagactgtggctgaaaaggaagtgaaaggggccgtgtactctatggtggaatttaacgggaagctgttagccagcatcaatagcacggtgcggctctatgagtggacaacagagaaggagctgcgcactgagtgcaaccactacaacaacatcatggccctctacctgaagaccaagggcgacttcatcctggtgggcgaccttatgcgctcagtgctgctgcttgcctacaagcccatggaaggaaactttgaagagattgctcgagactttaatcccaactggatgagtgctgtggaaatcttggatgatgacaattttctgggggctgaaaatgcctttaacttgtttgtgtgtcaaaaggatagcgctgccaccactgacgaggagcggcagcacctccaggaggttggtcttttccacctgggcgagtttgtcaatgtcttttgccacggctctctggtaatgcagaatctgggtgagacttccacccccacacaaggctcggtgctcttcggcacggtcaacggcatgatagggctggtgacctcactgtcagagagctggtacaacctcctgctggacatgcagaatcgactcaataaagtcatcaaaagtgtggggaagatcgagcactccttctggagatcctttcacaccgagcggaagacagaaccagccacaggtttcatcgacggtgacttgattgagagtttcctggatattagccgccccaagatgcaggaggtggtggcaaacctacagtatgacgatggcagcggtatgaagcgagaggccactgcagacgacctcatcaaggttgtggaggagctaactcggatccattag

SEQ ID NO: 116 - DNA, 1662 bp, Homo sapiens
atgctgtccgtgcgcgttgctgcggccgtggtccgcgcccttcctcggcgggccggactggtctccagaaatgctttgggttcatctttcattgctgcaaggaacttccatgcctctaacactcatcttcaaaagactgggactgctgagatgtcctctattcttgaagagcgtattcttggagctgatacctctgttgatcttgaagaaactgggcgtgtcttaagtattggtgatggtattgcccgcgtacatgggctgaggaatgttcaagcagaagaaatggtagagttttcttcaggcttaaagggtatgtccttgaacttggaacctgacaatgttggtgttgtcgtgtttggaaatgataaactaattaaggaaggagatatagtgaagaggacaggagccattgtggacgttccagttggtgaggagctgttgggtcgtgtagttgatgcccttggtaatgctattgatggaaagggtccaattggttccaagacgcgtaggcgagttggtctgaaagcccccggtatcattcctcgaatttcagtgcgggaaccaatgcagactggcattaaggctgtggatagcttggtgccaattggtcgtggtcagcgtgaactgattattggtgaccgacagactgggaaaacctcaattgctattgacacaatcattaaccagaaacgtttcaatgatggatctgatgaaaagaagaagctgtactgtatttatgttgctattggtcaaaagagatccactgttgcccagttggtgaagagacttacagatgcagatgccatgaagtacaccattgtggtgtcggctacggcctcggatgctgccccacttcagtacctggctccttactctggctgttccatgggagagtattttagagacaatggcaaacatgctttgatcatctatgacgacttatccaaacaggctgttgcttaccgtcagatgtctctgttgctccgccgaccccctggtcgtgaggcctatcctggtgatgtgttctacctacactcccggttgctggagagagcagccaaaatgaacgatgcttttggtggtggctccttgactgctttgccagtcatagaaacacaggctggtgatgtgtctgcttacattccaacaaatgtcatttccatcactgacggacagatcttcttggaaacagaattgttctacaaaggtatccgccctgcaattaacgttggtctgtctgtatctcgtgtcggatccgctgcccaaaccagggctatgaagcaggtagcaggtaccatgaagctggaattggctcagtatcgtgaggttgctgcttttgcccagttcggttctgacctcgatgctgccactcaacaacttttgagtcgtggcgtgcgtctaactgagttgctgaagcaaggacagtattctcccatggctattgaagaacaagtggctgttatctatgcgggtgtaaggggatatcttgataaactggagcccagcaagattacaaagtttgagaatgctttcttgtctcatgtcgtcagccagcaccaagccttgttgggcactatcagggctgatggaaagatctcagaacaatcagatgcaaagctgaaagagattgtaacaaatttcttggctggatttgaagcttaa

SEQ ID NO: 117 - DNA, 4740 bp, Homo sapiens
tggcttccttgtggttcctcagtggtgcctgcaacccctggttcacctccttccaggttctggctccttccagccatggctctcagagtccttctgttaacagccttgaccttatgtcatgggttcaacttggacactgaaaacgcaatgaccttccaagagaacgcaaggggcttcgggcagagcgtggtccagcttcagggatccagggtggtggttggagccccccaggagatagtggctgccaaccaaaggggcagcctctaccagtgcgactacagcacaggctcatgcgagcccatccgcctgcaggtccccgtggaggccgtgaacatgtccctgggcctgtccctggcagccaccaccagcccccctcagctgctggcctgtggtcccaccgtgcaccagacttgcagtgagaacacgtatgtgaaagggctctgcttcctgtttggatccaacctacggcagcagccccagaagttcccagaggccctccgagggtgtcctcaagaggatagtgacattgccttcttgattgatggctctggtagcatcatcccacatgactttcggcggatgaaggagtttgtctcaactgtgatggagcaattaaaaaagtccaaaaccttgttctctttgatgcagtactctgaagaattccggattcactttaccttcaaagagttccagaacaaccctaacccaagatcactggtgaagccaataacgcagctgcttgggcggacacacacggccacgggcatccgcaaagtggtacgagagctgtttaacatcaccaacggagcccgaaagaatgcctttaagatcctagttgtcatcacggatggagaaaagtttggcgatcccttgggatatgaggatgtcatccctgaggcagacagagagggagtcattcgctacgtcattggggtgggagatgccttccgcagtgagaaatcccgccaagagcttaataccatcgcatccaagccgcctcgtgatcacgtgttccaggtgaataactttgaggctctgaagaccattcagaaccagcttcgggagaagatctttgcgatcgagggtactcagacaggaagtagcagctcctttgagcatgagatgtctcaggaaggcttcagcgctgccatcacctctaatggccccttgctgagcactgtggggagctatgactgggctggtggagtctttctatatacatcaaaggagaaaagcaccttcatcaacatgaccagagtggattcagacatgaatgatgcttacttgggttatgctgccgccatcatcttacggaaccgggtgcaaagcctggttctgggggcacctcgatatcagcacatcggcctggtagcgatgttcaggcagaacactggcatgtgggagtccaacgctaatgtcaagggcacccagatcggcgcctacttcggggcctccctctgctccgtggacgtggacagcaacggcagcaccgacctggtcctcatcggggccccccattactacgagcagacccgagggggccaggtgtccgtgtgccccttgcccagggggagggctcggtggcagtgtgatgctgttctctacggggagcagggccaaccctggggccgctttggggcagccctaacagtgctgggggacgtaaatggggacaagctgacggacgtggccattggggccccaggagaggaggacaaccggggtgctgtttacctgtttcacggaacctcaggatctggcatcagcccctcccatagccagcggatagcaggctccaagctctctcccaggctccagtattttggtcagtcactgagtgggggccaggacctcacaatggatggactggtagacctgactgtaggagcccaggggcacgtgctgctgctcaggtcccagccagtactgagagtcaaggcaatcatggagttcaatcccagggaagtggcaaggaatgtatttgagtgtaatgatcaggtggtgaaaggcaaggaagccggagaggtcagagtctgcctccatgtccagaagagcacacgggatcggctaagagaaggacagatccagagtgttgtgacttatgacctggctctggactccggccgcccacattcccgcgccgtcttcaatgagacaaagaacagcacacgcagacagacacaggtcttggggctgacccagacttgtgagaccctgaaactacagttgccgaattgcatcgaggacccagtgagccccattgtgctgcgcctgaacttctctctggtgggaacgccattgtctgctttcgggaacctccggccagtgctggcggaggatgctcagagactcttcacagccttgtttccctttgagaagaattgtggcaatgacaacatctgccaggatgacctcagcatcaccttcagtttcatgagcctggactgcctcgtggtgggtgggccccgggagttcaacgtgacagtgactgtgagaaatgatggtgaggactcctacaggacacaggtcaccttcttcttcccgcttgacctgtcctaccggaaggtgtccacactccagaaccagcgctcacagcgatcctggcgcctggcctgtgagtctgcctcctccaccgaagtgtctggggccttgaagagcaccagctgcagcataaaccaccccatcttcccggaaaactcagaggtcacctttaatatcacgtttgatgtagactctaaggcttcccttggaaacaaactgctcctcaaggccaatgtgaccagtgagaacaacatgcccagaaccaacaaaaccgaattccaactggagctgccggtgaaatatgctgtctacatggtggtcaccagccatggggtctccactaaatatctcaacttcacggcctcagagaataccagtcgggtcatgcagcatcaatatcaggtcagcaacctggggcagaggagcccccccatcagcctggtgttcttggtgcccgtccggctgaaccagactgtcatatgggaccgcccccaggtcaccttctccgagaacctctcgagtacgtgccacaccaaggagcgcttgccctctcactccgactttctggctgagcttcggaaggcccccgtggtgaactgctccatcgctgtctgccagagaatccagtgtgacatcccgttctttggcatccaggaagaattcaatgctaccctcaaaggcaacctctcgtttgactggtacatcaagacctcgcataaccacctcctgatcgtgagcacagctgagatcttgtttaacgattccgtgttcaccctgctgccgggacagggggcgtttgtgaggtcccagacggagaccaaagtggagccgttcgaggtccccaaccccctgccgctcatcgtgggcagctctgtcgggggactgctgctcctggccctcatcaccgccgcgctgtacaagctcggcttcttcaagcggcaatacaaggacatgatgagtgaagggggtcccccgggggccgaaccccagtagcggctccttcccgacagagctgcctctcggtggccagcaggactctgcccagaccacacgagcccccaggctgctggacacgtcggacagcgaagtatccccgacaggacgggcttgggcttccatttgtgtgtgtgcaagtgtgtatgtgcgtgtgtgcgagtgtgtgcaagtgtctgtgtgcaagtgtgtgcacgtgtgcgtgtgcgtgcatgtgcactcgcacgcccatgtgtgagtgtgtgcaagtatgtgagtgtgtccagtgtgtgtgcgtgtgtccatgtgtgtgcagtgtgtgcatgtgtgcgagtgtgtgcatgtgtgtgctcaggggctgtggctcacgtgtgtgactcagagtgtctctggcgtgtgggtaggtgacggcagcgtagcctctccggcagaagggaactgcctgggctcccttgtgcgtgggtaagccgctgctgggttttcctccgggagaggggacggtcaatcctgtgggtgaagagagagggaaacacagcagcatctctccactgaaagaagtgggacttcccgtcgcctgcgagcctgcggcctgctggagcctgcgcagcttggatggatactccatgagaaaagccgtgggtggaaccaggagcctcctccacaccagcgctgatgcccaataaagatgcccactgaggaatcatgaagcttcctttctggattcatttattatttcaatgtgactttaattttttggatggataagcctgtctatggtacaaaaatcacaaggcattcaagtgtacagtgaaaagtctccctttccagatattcaagtcacctccttaaaggtagtcaagattgtgttttgaggtttccttcagacagattccaggcgatgtgcaagtgtatgcacgtgtgcacacaccacacacatacacacacacaagcttttttacacaaatggtagcatactttatattggtctgtatcttgctttttttcaccaatatttctcagacatcggttcatattaagacataaattactttttcattcttttataccgctgcatagtattccattgtgtgagtgtaccataatgtatttaaccagtcttcttttgatatactattttcatctcttgttattgcatctgctgagttaataaatcaaatatatgtcaaaaaaaaaaaaaaaaaaaaaaaaaaaaaaaaaaaaaaaaat

SEQ ID NO: 118 - DNA, 1231 bp, Homo sapiens
gacaagatggccacaccggcggtaccagtaagtgctcctccggccacgccaaccccagtcccggcggcggccccagcctcagttccagcgccaacgccagcaccggctgcggctccggttcccgctgcggctccagcctcatcctcagaccctgcggcagcagcggctgcaactgcggctcctggccagaccccggcctcagcgcaagctccagcgcagaccccagcgcccgctctgcctggtcctgctcttccagggcccttccccggcggccgcgtggtcaggctgcacccagtcattttggcctccattgtggacagctacgagagacgcaacgagggtgctgcccgagttatcgggaccctgttgggaactgtcgacaaacactcagtggaggtcaccaattgcttttcagtgccgcacaatgagtcagaagatgaagtggctgttgacatggaatttgctaagaatatgtatgaactgcataaaaaagtttctccaaatgagctcatcctgggctggtacgctacgggccatgacatcacagagcactctgtgctgatccatgagtactacagccgagaggcccccaaccccatccacctcactgtggacacaagtctccagaacggccgcatgagcatcaaagcctacgtcagcactttaatgggagtccctgggaggaccatgggagtgatgttcacgcctctgacagtgaaatacgcgtactacgacactgaacgcatcggagttgacctgatcatgaagacctgctttagccccaacagagtgattggactctcaagtgacttgcagcaagtaggaggggcatcagctcgcatccaggatgccctgagtacagtgttgcaatatgcagaggatgtactgtctggaaaggtgtcagctgacaatactgtgggccgcttcctgatgagcctggttaaccaagtaccgaaaatagttcccgatgactttgagaccatgctcaacagcaacatcaatgaccttttgatggtgacctacctggccaacctcacacagtcacagattgcactcaatgaaaaacttgtaaacctgtgaatggaccccaagcagtacacttgctggtctaggtattaaccccaggactcagaagtgaaggagaaatgggttttttgtggtcttgagtcacactgagatagtcagttgtgtgtgactctaataaacggagcctaccttttgtaaaaaaaaa

SEQ ID NO: 119 - DNA, 1941 bp, Homo sapiens; identical to SEQ ID NO: 79

SEQ ID NO: 120 - DNA, 552 bp, Homo sapiens
atggagaacggagcggtgtacagccccactacggaggaggacccgggccccgccagaggcccccggagcggcctcgctgcctactttttcatgggccggctcccattgctccggcgcgttctcaagggcttgcagctgttgctgtctctgctggccttcatctgtgaagaagttgtatcacaatgtactttatgtggaggactttatttttttgagtttgtaagctgcagtgcctttcttctgagtctccttatactgattgtgtattgcactccattttatgagagagttgataccacaaaagtaaaatcatcggatttttatattactttgggaacaggatgtgtgtttttgttggcatccatcatttttgtttccacacatgacaggacttcagctgagattgctgcaattgtgtttggatttatagcaagttttatgttcctacttgactttatcactatgctgtatgaaaaacgacaggagtcccagctgagaaaacctgaaaataccactagggctgaagccctcactgagccacttaatgcctaa

SEQ ID NO: 121 - DNA, 558 bp, Homo sapiens
atgaagctggtttccgtcgccctgatgtacctgggttcgctcgccttcctaggcgctgacaccgctcggttggatgtcgcgtcggagtttcgaaagaagtggaataagtgggctctgagtcgtgggaagagggaactgcggatgtccagcagctaccccaccgggctcgctgacgtgaaggccgggcctgcccagacccttattcggccccaggacatgaagggtgcctctcgaagccccgaagacagcagtccggatgccgcccgcatccgagtcaagcgctaccgccagagcatgaacaacttccagggcctccggagctttggctgccgcttcgggacgtgcacggtgcagaagctggcacaccagatctaccagttcacagataaggacaaggacaacgtcgcccccaggagcaagatcagcccccagggctacggccgccggcgccggcgctccctgcccgaggccggcccgggtcggactctggtgtcttctaagccacaagcacacggggctccagcccccccgagtggaagtgctccccactttctttag

SEQ ID NO: 122 - DNA, 495 bp, Homo sapiens
atggcttcgccacaccaagagcccaaacctggagacctgattgagattttccgccttggctatgagcactgggccctgtatataggagatggctacgtgatccatctggctcctccaagtgagtaccccggggctggctcctccagtgtcttctcagtcctgagcaacagtgcagaggtgaaacgggagcgcctggaagatgtggtgggaggctgttgctatcgggtcaacaacagcttggaccatgagtaccaaccacggcccgtggaggtgatcatcagttctgcgaaggagatggttggtcagaagatgaagtacagtattgtgagcaggaactgtgagcactttgtcacccagctgagatatggcaagtcccgctgtaaacaggtggaaaaggccaaggttgaagttggtgtggccacggcgcttggaatcctggttgttgctggatgctcttttgcgattaggagataccaaaaaaaagcgacagcctga

SEQ ID NO: 123 - DNA, 2893 bp, Homo sapiens
ccactctaaggaatgcggtccctttgacaggcgaaaaactgaagttggaaaagacaaagtgatttgttcaaaattgaaatttgaaacttgacatttggtcagtgggccctatgtaggaaaaaacctccaagagagctagggttcctctcagagaggaaagacaggtccttaggtcctcaccctcccgtctccttgcccttgcagttctgggaactggacagattggacaactataacgacacctccctggtggaaaatcatctctgccctgccacagaggggcccctcatggcctccttcaaggccgtgttcgtgcccgtggcctacagcctcatcttcctcctgggcgtgatcggcaacgtcctggtgctggtgatcctggagcggcaccggcagacacgcagttccacggagaccttcctgttccacctggccgtggccgacctcctgctggtcttcatcttgccctttgccgtggccgagggctctgtgggctgggtcctggggaccttcctctgcaaaactgtgattgccctgcacaaagtcaacttctactgcagcagcctgctcctggcctgcatcgccgtggaccgctacctggccattgtccacgccgtccatgcctaccgccaccgccgcctcctctccatccacatcacctgtgggaccatctggctggtgggcttcctccttgccttgccagagattctcttcgccaaagtcagccaaggccatcacaacaactccctgccacgttgcaccttctcccaagagaaccaagcagaaacgcatgcctggttcacctcccgattcctctaccatgtggcgggattcctgctgcccatgctggtgatgggctggtgctacgtgggggtagtgcacaggttgcgccaggcccagcggcgccctcagcggcagaaggcagtcagggtggccatcctggtgacaagcatcttcttcctctgctggtcaccctaccacatcgtcatcttcctggacaccctggcgaggctgaaggccgtggacaatacctgcaagctgaatggctctctccccgtggccatcaccatgtgtgagttcctgggcctggcccactgctgcctcaaccccatgctctacactttcgccggcgtgaagttccgcagtgacctgtcgcggctcctgacgaagctgggctgtaccggccctgcctccctgtgccagctcttccctagctggcgcaggagcagtctctctgagtcagagaatgccacctctctcaccacgttctaggtcccagtgtccccttttattgctgcttttccttggggcaggcagtgatgctggatgctccttccaacaggagctgggatcctaagggctcaccgtggctaagagtgtcctaggagtatcctcatttggggtagctagaggaaccaacccccatttctagaacatccctgccagctcttctgccggccctggggctaggctggagcccagggagcggaaagcagctcaaaggcacagtgaaggctgtccttacccatctgcacccccctgggctgagagaacctcacgcacctcccatcctaatcatccaatgctcaagaaacaacttctacttctgcccttgccaacggagagcgcctgcccctcccagaacacactccatcagcttaggggctgctgacctccacagcttcccctctctcctcctgcccacctgtcaaacaaagccagaagctgagcaccaggggatgagtggaggttaaggctgaggaaaggccagctggcagcagagtgtggccttcggacaactcagtccctaaaaacacagacattctgccaggcccccaagcctgcagtcatcttgaccaagcaggaagctcagactggttgagttcaggtagctgcccctggctctgaccgaaacagcgctgggtccaccccatgtcaccggatcctgggtggtctgcaggcagggctgactctaggtgcccttggaggccagccagtgacctgaggaagcgtgaaggccgagaagcaagaaagaaacccgacagagggaagaaaagagctttcttcccgaaccccaaggagggagatggatcaatcaaacccggcggtcccctccgccaggcgagatggggtggggtggagaactcctagggtggctgggtccaggggatgggaggttgtgggcattgatggggaaggaggctggcttgtcccctcctcactcccttcccataagctatagacccgaggaaactcagagtcggaacggagaaaggtggactggaaggggcccgtgggagtcatctcaaccatcccctccgtggcatcaccttaggcagggaagtgtaagaaacacactgaggcagggaagtccccaggccccaggaagccgtgccctgcccccgtgaggatgtcactcagatggaaccgcaggaagctgctccgtgcttgtttgctcacctggggtgtgggaggcccgtccggcagttctgggtgctccctaccacctccccagcctttgatcaggtggggagtcagggacccctgcccttgtcccactcaagccaagcagccaagctccttgggaggccccactggggaaataacagctgtggctcacgtgagagtgtcttcacggcaggacaacgaggaagccctaagacgtcccttttttctctgagtatctcctcgcaagctgggtaatcgatgggggagtctgaagcagatgcaaagaggcaagaggctggattttgaattttctttttaataaaaaggcacctataaaacaggtcaatacagtacaggcagcacagagacccccggaacaagcctaaaaattgtttcaaaataaaaaccaagaagatgtcttcaaaaaaaaaaaaaaaaaaaaaaa

SEQ ID NO: 124 - DNA, 393 bp, Homo sapiens
atgtctggacgtggtaagcaaggaggcaaagctcgcgccaaagcgaaatcccgctcttctcgcgctggtctccagttcccggtgggccgagtgcaccgcctgctccgtaaaggcaactacgcagagcgggttggggcaggcgcgccggtgtacctggcggcggtgttagagtacctgaccgccgagatcctggagctggccggcaacgcggctcgcgacaacaagaagactcgcatcatcccgcgccacttgcagctggccatccgcaacgacgaggagctcaacaaactgctaggccgggtgaccattgctcagggcggcgtccttcctaacatccaggccgtgcttctgcctaagaagaccgagagtcaccacaaggccaagggcaagtga

SEQ ID NO: 125 - DNA, 654 bp, Homo sapiens
atggcctacccgggatacggaggagggtttggaaattttagcattcaggtgccaggaatgcagatgggacagccagtgccagaaacaggcccagctatactcctcgatggatactctgggccagcatattcagacacttattcctcagctggtgactccgtgtatacttacttcagtgctgttgctggacaggatggtgaagtggatgctgaagaacttcagagatgtttgacacagtctggaattaatggaacttactctcccttcagtttggaaacctgcagaattatgattgccatgttggatagagatcacacaggaaaaatgggatttaatgcattcaaagagctatgggcagctcttaatgcctggaaggaaaacttcatgactgttgatcaagatggaagtggcacagtagaacatcatgagttgcgtcaagccattggtcttatgggttataggttgagtcctcaaacattaactactattgttaaacgttatagcaagaatggcagaattttctttgatgattatgttgcttgctgtgtgaagcttcgagcattgacagatttctttaggaaaagagaccacttgcaacaagggtctgcgaatttcatatatgacgattttttgcagggcactatggcaatttga

SEQ ID NO: 126 - DNA, 2577 bp, Homo sapiens
atggtgaacttcacggtagaccagatccgcgccatcatggacaagaaggccaacatccgcaacatgtctgtcatcgcccacgtggaccatggcaagtccacgctgacagactccctggtgtgcaaggcgggcatcatcgcctcggcccgggccggggagacacgcttcactgatacccggaaggacgagcaggagcgttgcatcaccatcaagtcaactgccatctccctcttctacgagctctcggagaatgacttgaacttcatcaagcagagcaaggacggtgccggcttcctcatcaacctcattgactcccccgggcatgtcgacttctcctcggaggtgactgctgccctccgagtcaccgatggcgcattggtggtggtggactgcgtgtcaggcgtgtgcgtgcagacggagacagtgctgcggcaggccattgccgagcgcatcaagcctgtgctgatgatgaacaagatggaccgcgccctgctggagctgcagctggagcccgaggagctctaccagactttccagcgcatcgtggagaacgtgaacgtcatcatctccacctacggcgagggcgagagcggccccatgggcaacatcatgatcgatcctgtcctcggtaccgtgggctttgggtctggcctccacgggtgggccttcaccctgaagcagtttgccgagatgtatgtggccaagttcgccgccaagggggagggccagttggggcctgccgagcgggccaagaaagtagaggacatgatgaagaagctgtggggtgacaggtactttgacccagccaacggcaagttcagcaagtcagccaccagccccgaagggaagaagctgccacgcaccttctgccagctgatcctggaccccatcttcaaggtgtttgatgcgatcatgaatttcaagaaagaggagacagcaaaactgatagagaaactggacatcaaactggacagcgaggacaaggacaaagaaggcaaacccctgctgaaggctgtgatgcgccgctggctgcctgccggagacgccttgttgcagatgatcaccatccacctgccctcccctgtgacggcccagaagtaccgctgcgagctcctgtacgaggggcccccggacgacgaggctgccatgggcattaaaagctgtgaccccaaaggccctcttatgatgtatatttccaaaatggtgccaacctccgacaaaggtcggttctacgcctttggacgagtcttctcggggctggtctccactggcctgaaggtcaggatcatggggcccaactatacccctgggaagaaggaggacctctacctgaagccaatccagagaacaatcttgatgatgggccgctacgtggagcccatcgaggatgtgccttgtgggaacattgtgggcctcgtgggcgtggaccagttcctggtgaagacgggcaccatcaccaccttcgagcacgcgcacaacatgcgggtgatgaagttcagcgtcagccctgttgtcagagtggccgtggaggccaagaacccggctgacctgcccaagctggtggaggggctgaagcggctggccaagtccgaccccatggtgcagtgcatcatcgaggagtcgggagagcatatcatcgcgggcgccggcgagctgcacctggagatctgcctgaaggacctggaggaggaccacgcctgcatccccatcaagaaatctgacccggtcgtctcgtaccgcgagacggtcagtgaagagtcgaacgtgctctgcctctccaagtcccccaacaagcacaaccggctgtacatgaaggcgcggcccttccccgacggcctggccgaggacatcgataaaggcgaggtgtccgcccgtcaggagctcaagcagcgggcgcgctacctggccgagaagtacgagtgggacgtggctgaggcccgcaagatctggtgctttgggcccgacggcaccggccccaacatcctcaccgacatcaccaagggtgtgcagtacctcaacgagatcaaggacagtgtggtggccggcttccagtgggccaccaaggagggcgcactgtgtgaggagaacatgcggggtgtgcgcttcgacgtccacgacgtcaccctgcacgccgacgccatccaccgcggagggggccagatcatccccacagcacggcgctgcctctatgccagtgtgctgaccgcccagccacgcctcatggagcccatctaccttgtggagatccagtgtccagagcaggtggtcggtggcatctacggggttttgaacaggaagcggggccacgtgttcgaggagtcccaggtggccggcacccccatgtttgtggtcaaggcctatctgcccgtcaacgagtcctttggcttcaccgctgacctgaggtccaacacgggcggccaggcgttcccccagtgtgtgtttgaccactggcagatcctgcccggagaccccttcgacaacagcagccgccccagccaggtggtggcggagacccgcaagcgcaagggcctgaaagaaggcatccctgccctggacaacttcctggacaaattgtag

SEQ ID NO: 127 - DNA, 450 bp, Homo sapiens
atggctgatcagctgaccgaagaacagattgctgaattcaaggaagccttctccctatttgataaagatggcgatggcaccatcacaacaaaggaacttggaactgtcatgaggtcactgggtcagaacccaacagaagctgaattgcaggatatgatcaatgaagtggatgctgatggtaatggcaccattgacttccccgaatttttgactatgatggctagaaaaatgaaagatacagatagtgaagaagaaatccgtgaggcattccgagtctttgacaaggatggcaatggttatatcagtgcagcagaactacgtcacgtcatgacaaacttaggagaaaaactaacagatgaagaagtagatgaaatgatcagagaagcagatattgatggagacggacaagtcaactatgaagaattcgtacagatgatgactgcaaaatga

SEQ ID NO: 128 - DNA, 3597 bp, Homo sapiens
atggatgaagagactcggcacagccttgagtgcatccaggccaatcagatctttcccaggaagcagctgatccgggaggatgagaatcttcaggttcctttccttgaacttcatggagagagcacagagtttgtgggccgtgccgaggatgccatcattgccctttccaattacagacttcacatcaagttcaaggagtctcttgttaatgttccattacagcttatagaaagtgttgaatgccgagatatatttcagcttcatttgacttgcaaagactgcaaagttatcaggtgtcagttttcaacctttgagcagtgtcaagagtggctgaagagactgaacaacgcaatccgaccacctgctaaaatagaagatctcttctcatttgcataccatgcttggtgcatggaggtctatgccagtgaaaaagagcaacatggagacctgtgcagaccaggggagcatgtaacttcaaggtttaaaaacgaggtggagaggatgggttttgatatgaacaacgcctggaggatttccaacatcaatgagaagtacaaattatgtggtagctatcctcaagagctcatagtgcctgcctggatcactgacaaagaactggaaagtgtatcaagtttcaggtcctggaagcgcatccctgccgtcatctacaggcaccagagcaatggagctgtcattgcccgctgtggacagccagaggttagctggtggggctggcgaaatgcagatgatgagcatctggtacagtcagtagccaaagcttgtgcctctgactcccgatcgagtggcagcaagctgtcaactaggaacacttctcgagactttcccaatgggggagacctttctgacgtggagttcgattcttctctgtcaaatgcttcaggagcagagagtttagccatccaaccgcagaagcttttgatcttggatgcacgctcctatgcagctgctgtggcaaaccgagccaaaggaggaggctgcgaatgcccagagtattacccaaactgtgaagttgtgtttatggggatggcaaacattcattctattcggaggagttttcagtctctgcggttgctgtgcactcagatgccagatccgggaaattggctatcagctcttgaaagcacaaaatggctccatcacttgtctgtgcttctgaaatcagcgcttctggtagtgcatgctgtggatcaggatcagcggccggtgctagtacactgctcagatggctgggaccgcaccccccagattgtggcattggctaagctcttgctggacccttattaccgaaccatagagggtttccaggtcctcgtggaaatggagtggctggattttggccataaatttgctgaccggtgtggtcatggggagaactcggatgatctgaatgaacgttgcccagtgtttctgcagtggcttgactgtgttcatcagcttcagaggcaatttccttgctcttttgagttcaatgaagcattccttgtgaaactggtgcagcatacctattcctgcctgtttggaacattcctgtgcaacaacgccaaggagagaggggaaaagcatactcaggaacggacatgttccgtgtggtcacttcttcgggcaggcaacaaggctttcaaaaacctactgtattcctctcagtcagaagccgtgctgtaccctgtgtgccatgtgcgtaacctgatgctgtggagtgcagtgtacctgccctgcccatccccaaccacccctgtggacgacagctgtgcaccatacccagccccaggcaccagccctgatgatccccccctgagccggctaccaaagactagatcatacgacaatctgaccacagcctgtgacaacacagtgcctctggccagccggcgctgcagcgaccccagcctgaacgagaagtggcaggagcaccggcgctcactagagctgagcagcctggctggccctggagaggatcccctttctgccgacagcctagggaagcccaccagagtgccggggggtgccgagctttctgttgcagccggagtagctgaggggcagatggagaacatcttgcaggaggccaccaaagaggagagtggagtagaggaacctgcccacagggcaggcattgagatacaggagggtaaagaggaccctctcttagaaaaggagagcaggaggaagacacctgaggcctcagccattggacttcaccaagacccagaactgggtgatgctgctctgaggagccatctggatatgagctggcctctgttctcacagggcatttctgaacagcagagtgggctcagtgttctcctcagttctctccaggtcccccccaggggagaggattccctggaggtccctgtggagcagtttcgaatagaagagattgcagagggtagggaggaagcagttcttccaatcccagtagatgcaaaagttggctatggtacctcacagtcatgttctctgctaccttcccaagtcccttttgagaccagaggaccaaacgtggacagttctacagacatgttagtggaagataaggtgaagtcagtaagtgggccccaaggtcatcatagatcttgccttgtaaatagtggcaaggacaggcttcctcagaccatggaacccagcccttcagagacaagcctggtcgagaggccccaagtggggtctgtggtgcataggacttcccttggcagcactctcagcctgacacgttccccttgtgccttgcctttagccgaatgtaaagaggggcttgtgtgcaatggtgccccagagactgaaaacagggcctcagagcagcccccaggtcttagcaccctccagatgtaccccacacccaatgggcattgcgccaatggggaggctggtaggagcaaggactcactgagccgtcagctgtctgctatgagctgcagctctgcccacttacactcaaggaacttgcaccacaagtggctgcatagccactcaggaaggccatctgcaaccagcagccccgaccagccttcccgcagccacctggacgatgatggcatgtcagtgtacacagacacgatccaacagcgcctgcgtcagattgagtcaggccaccagcaggaagtagaaactttgaagaaacaagtccaggagctgaagagtcgcctggagagccagtacctgaccagctccctacactttaatggagactttggggatgaggtgacttcaatccccgactcggaaagcaatctggatcagaactgtttgtctcgctgcagcacagagattttctctgaagccagctgggagcaggtggataaacaggacacagagatgacccgttggcttcctgaccacctggccgcccactgctatgcgtgcgacagtgccttctggcttgccagcaggaagcaccactgcaggaattgtgggaacgtattctgctccagttgttgtaaccagaaggttccagttcccagccagcagctctttgaacccagtcgagtatgcaagtcttgctatagcagcctacatcccacaagctccagcattgaccttgaactggataagcccattgctgccacttccaactga

SEQ ID NO: 129 - DNA, 786 bp, Homo sapiens
atgatcgaaacatacaaccaaacttctccccgatctgcggccactggactgcccatcagcatgaaaatttttatgtatttacttactgtttttcttatcacccagatgattgggtcagcactttttgctgtgtatcttcatagaaggttggacaagatagaagatgaaaggaatcttcatgaagattttgtattcatgaaaacgatacagagatgcaacacaggagaaagatccttatccttactgaactgtgaggagattaaaagccagtttgaaggctttgtgaaggatataatgttaaacaaagaggagacgaagaaagaaaacagctttgaaatgcaaaaaggtgatcagaatcctcaaattgcggcacatgtcataagtgaggccagcagtaaaacaacatctgtgttacagtgggctgaaaaaggatactacaccatgagcaacaacttggtaaccctggaaaatgggaaacagctgaccgttaaaagacaaggactctattatatctatgcccaagtcaccttctgttccaatcgggaagcttcgagtcaagctccatttatagccagcctctgcctaaagtcccccggtagattcgagagaatcttactcagagctgcaaatacccacagttccgccaaaccttgcgggcaacaatccattcacttgggaggagtatttgaattgcaaccaggtgcttcggtgtttgtcaatgtgactgatccaagccaagtgagccatggcactggcttcacgtcctttggcttactcaaactctga

SEQ ID NO: 130 - DNA, 4386 bp, Homo sapiens
atggccctctcagtggactcatcgtggcatcggtggcagtggagagtcagagatggcttcccccattgtccatcggaaaccacaccgctgctctctccagagaaagggagacagagctacaacttgacacagcagcgggtcgtgttccccaacaacagcatattccatcaagattgggaagaggtctccaggagataccctggcaacagaacctgcacaaccaaatacaccctcttcaccttcctgccccggaatctctttgagcaatttcatagatgggctaacctctatttcctgttcctggtgattttgaactggatgccctccatggaagtcttccacagagaaatcaccatgttaccattggccattgtcctgttcgtcatcatgatcaaggatggcatggaggacttcaagagacaccgctttgataaagcaataaactgctccaacattcgaatttatgaaagaaaagagcagacctatgtgcagaagtgctggaaggatgtgcgcgtgggagacttcatccaaatgaaatgcaatgagattgtcccagcagacatactcctccttttttcctctgaccccaatgggatatgccatctggaaactgccagcttggatggagagacaaacctcaagcaaagatgtgtcgtgaagggcttctcacagcaggaggtacagttcgaaccagagcttttccacaataccatcgtgtgtgagaaacccaacaaccacctcaacaaatttaagggttatatggagcatcctgaccagaccaggactggctttggctgtgagagtcttctgcttcgaggctgcaccatcagaaacaccgagatggctgttggcattgtcatctatgcaggccatgagacgaaagccatgctgaacaacagtggcccccggtacaaacgcagcaagattgagcggcgcatgaatatagacatcttcttctgcattgggatcctcatcctcatgtgccttattggagctgtaggtcacagcatctggaatgggacctttgaagaacaccctcccttcgatgtgccagatgccaatggcagcttccttcccagtgcccttgggggcttctacatgttcctcacaatgatcatcctgctccaggtgctgatccccatctctttgtatgtctccattgagctggtgaagctcgggcaagtgttcttcttgagcaatgaccttgacctgtatgatgaagagaccgatttatccattcaatgtcgagccctcaacatcgcagaggacttgggccagatccagtacatcttctccgataagacggggaccctgacagagaacaagatggtgttccgacgttgcaccatcatgggcagcgagtattctcaccaagaaaatgctaagcgactggagaccccaaaggagctggactcagatggtgaagagtggacccaataccaatgcctgtccttctcggctagatgggcccaggatccagcaactatgagaagccaaaaaggtgctcagcctctgaggaggagccagagtgcccgggtgcccatccagggccactaccggcaaaggtctatggggcaccgtgaaagctcacagcctcctgtggccttcagcagctccatagaaaaagatgtaactccagataaaaacctactgaccaaggttcgagatgctgccctgtggttggagaccttgtcagacagcagacctgccaaggcttccctctccaccacctcctccattgctgatttcttccttgccttaaccatctgcaactctgtcatggtgtccacaaccaccgagcccaggcagagggtcaccatcaaaccctcaagcaaggctctggggacgtccctggagaagattcagcagctcttccagaagttgaagctattgagcctcagccagtcattctcatccactgcaccctctgacacagacctcggggagagcttaggggccaacgtggccaccacagactcggatgagagagatgatgcatctgtgtgcagtggaggtgactccactgatgacggtggctacaggagcagcatgtgggaccagggcgacatcctggagtctgggtcaggcacttccttggaggaggcattggaggccccagccacagacctggccaggcctgagttctgttacgaggctgagagccctgatgaggccgccctggtgcacgctgcccatgcctacagcttcacactagtgtcccggacacctgagcaggtgactgtgcgcctgccccagggcacctgcctcaccttcagcctcctctgcaccctgggctttgactctgtcaggaagagaatgtctgtggttgtgaggcacccactgactggcgagattgttgtctacaccaagggtgctgactcggtcatcatggacctgctggaagacccagcctgcgtacctgacattaatatggaaaagaagctgagaaaaatccgagcccggacccaaaagcatctagacttgtatgcaagagatggcctgcgcacactatgcattgccaagaaggttgtaagcgaagaggacttccggagatgggccagtttccggcgtgaggctgaggcatccctcgacaaccgagatgagcttctcatggaaactgcacagcatctggagaatcaactcaccttacttggagccactgggatcgaagaccggctgcaggaaggagttccagatacgattgccactctgcgggaggctgggatccagctctgggtcctgactggagataagcaggagacagcggtcaacattgcccattcctgcagactgttaaatcagaccgacactgtttataccatcaatacagagaatcaggagacctgtgaatccatcctcaattgtgcattggaagagctaaagcaatttcgtgaactacagaagccagaccgcaagctctttggattccgcttaccttccaagacaccatccatcacctcagaagctgtggttccagaagctggattggtcatcgatgggaagacattgaatgccatcttccagggaaagctagagaagaagtttctggaattgacccagtattgtcggtccgtcctgtgctgccgctccacgccactccagaagagtatgatagtcaagctggtgcgagacaagttgcgcgtcatgaccctttccataggtgatggagcaaatgatgtaagcatgattcaagctgctgatattggaattggaatatctggacaggaaggcatgcaggctgtcatgtccagcgactttgccatcacccgctttaagcatctcaagaagttgctgctcgtgcatggccactggtgttactcgcgcctggccaggatggtggtgtactacctctacaagaacgtgtgctacgtcaacctgctcttctggtatcagttcttctgtggtttctccagctccaccatgattgattactggcagatgatattcttcaatctcttctttacctccttgcctcctcttgtctttggagtccttgacaaagacatctctgcagaaacactcctggcattgcctgagctatacaagagtggccagaactctgagtgctataacctgtcgactttctggatttctatggtggatgcattctaccagagcctcatctgtttctttatcccttacctggcctataagggctctgatatagatgtctttacctttgggacaccaatcaacaccatctccctcaccacaatccttttgcaccaggcaatggaaatgaagacatggaccattttccacggagtcgtgctcctcggcagcttcctgatgtactttctggtatccctcctgtacaatgccacctgcgtcatctgcaacagccccaccaatccctattgggtgatggaaggccagctctcaaaccccactttctacctcgtctgctttctcacaccagttgttgctcttctcccaagatactttttcctgtctctgcaaggaacttgtgggaagtctctaatctcaaaagctcagaaaattgacaaactccccccagacaaaagaaacctggaaatccagagttggagaagcagacagaggcctgcccctgtccccgaagtggctcgaccaactcaccacccagtgtcatctatcacaggacaggacttcagtgccagcaccccaaagagctctaaccctcccaagaggaagcatgtggaagagtcagtactccacgaacagagatgtggcacggagtgcatgagggatgactcatgctcaggggactcctcagctcaactctcatccggggagcacctgctgggacctaacaggataatggcctactcaagaggacagactgatatgtgccggtgctcaaagaggagcagccatcgccgatcccagagttcactgaccatatga

SEQ ID NO: 131 - DNA, 1140 bp, Homo sapiens
atgtcgcgcagtggaaccgatcctcagcaacgccagcaggcgtcagaggcggacgccgcagcagcaaccttccgggcaaacgaccatcagcatatccgctacaacccgctgcaggatgagtgggtgctggtgtcagctcaccgcatgaagcggccctggcagggtcaagtggagccccagcttctgaagacagtgccccgccatgaccctctcaaccctctgtgtcctggggccatccgagccaacggagaggtgaatccccagtacgatagcaccttcctgtttgacaacgacttcccagctctgcagcctgatgcccccagtccaggacccagtgatcatccccttttccaagcaaagtctgctcgaggagtctgtaaggtcatgtgcttccacccctggtcggatgtaacgctgccactcatgtcggtccctgagatccgggctgttgttgatgcatgggcctcagtcacagaggagctgggtgcccagtacccttgggtgcagatctttgaaaacaaaggtgccatgatgggctgttctaacccccacccccactgccaggtatgggccagcagtttcctgccagatattgcccagcgtgaggagcgatctcagcaggcctataagagtcagcatggagagcccctgctaatggagtacagccgccaggagctactcaggaaggaacgtctggtcctaaccagtgagcactggttagtactggtccccttctgggcaacatggccctaccagacactgctgctgccccgtcggcatgtgcggcggctacctgagctgacccctgctgagcgtgatgatctagcctccatcatgaagaagctcttgaccaagtatgacaacctctttgagacgtcctttccctactccatgggctggcatggggctcccacaggatcagaggctggggccaactggaaccattggcagctgcacgctcattactaccctccgctcctgcgctctgccactgtccggaaattcatggttggctacgaaatgcttgctcaggctcagagggacctcacccctgagcaggctgcagagagactaagggcacttcctgaggttcattaccacctggggcagaaggacagggagacagcaaccatcgcctga

SEQ ID NO: 132 - DNA, 312 bp, Homo sapiens
atgtctggccgtggtaaaggtggaaaaggtttgggtaagggaggagctaagcgtcatcgcaaggttttgcgcgataacatccagggcatcactaagccagctatccggcgccttgctcgtcgcggcggtgtcaagcgaatttctggccttatctatgaggagactcgtggtgttctgaaggtgttcctggagaacgtgattcgtgacgctgtcacttacacagagcacgccaaacgcaagaccgtgacagcaatggatgtggtctacgcgctgaagcgacagggacgcactctttacggcttcggtggctaa

SEQ ID NO: 133 - DNA, 2118 bp, Homo sapiens
atggagaagccccggagtattgaggagaccccatcttcagaaccaatggaggaagaggaagatgacgacttggagctgtttggtggctatgatagtttccggagttataacagcagtgtgggcagtgagagcagctcctatctggaggagtcaagtgaagcagaaaatgaggatcgggaagcaggggaactgccgacctccccgctgcatttgctcagccctgggactcctcgctccttggatggcagtggttctgagccagctgtctgtgagatgtgtggtatcgtgggtacaagggaagccttcttctccaagaccaagaggttctgcagcgtctcctgctccaggagctactcctccaactccaagaaagccagtatcttggctaggttacagggaaaaccaccgaccaaaaaagccaaagtcctgcacaaggctgcctggtctgccaaaattggagccttcctccactctcaagggacaggacagctggcagatgggacaccaacaggacaagacgctctggtcttgggcttcgactgggggaagttcctgaaggatcacagttacaaggctgctcccgtcagctgtttcaagcacgtcccactctatgaccagtgggaggatgtgatgaaagggatgaaggtggaggtgctcaacagtgatgctgtgctccccagccgggtgtactggatcgcctctgtcatccagacagcagggtatcgggtgctgcttcggtatgaaggctttgaaaatgacgccagccatgacttctggtgcaacctgggaacagtggatgtccaccccattggctggtgtgccatcaacagcaagatcctagtgcccccacggaccatccatgccaagttcaccgactggaagggctacctcatgaaacggctggtgggctccaggacgcttcccgtggatttccacatcaagatggtggagagcatgaagtacccctttaggcagggcatgcggctggaagtggtggacaagtcccaggtgtcacgcactcgcatggctgtggtggacacagtaatcgggggtcgcctacggctcctctacgaggatggtgacagtgacgacgacttctggtgccacatgtggagccccctgatccacccagtgggttggtcacgacgtgtgggccacggcatcaagatgtcagagaggcgaagtgacatggcccatcaccccaccttccggaagatctactgtgatgccgttccttacctcttcaagaaggtacgagcagtctacacagaaggcggttggtttgaggaagggatgaagctggaggccattgaccccctgaatctgggcaacatctgcgtggcaactgtctgtaaggttctcctggatggatacctgatgatctgtgtggacggggggccctccacagatggcttggactggttctgctaccatgcctcttcccacgccatcttcccggccaccttctgtcagaagaatgacattgagctcacaccgccaaaaggttatgaggcacagactttcaactgggagaactacttggagaagaccaagtcgaaagccgctccatcgagactctttaacatggattgcccaaaccatggcttcaaggtgggcatgaagctggaggccgtggacctgatggagccccggctcatctgtgtggccacggtgaaacgagtggtgcatcggctcctcagcatccactttgacggctgggacagcgagtacgaccagtgggtggactgcgagtccccagacatctaccccgtcggctggtgtgagctcaccggctaccagctccagcctcctgtggccgcagaaccggccacaccgctgaaggccaaagaggccacaaagaagaaaaagaaacagtttgggaagaaaaggaaaagaatcccgcccactaagacgcgacccctcagacaggggtccaagaagcccctgctggaggacgaccctcagggtgccaggaagatctcgtcggagcctgttcctggcgagatcattgctgtgcgtgtgaaggaagagcatctagacgtggcctcgcccgacaaggcttcaagtccagagctgcctgtctccgtcgagaacatcaagcaggaaacagacgactga

SEQ ID NO: 134 - DNA, 1779 bp, Homo sapiens
atggctcccggccagctcgccttatttagtgtctctgacaaaaccggccttgtggaatttgcaagaaacctgaccgctcttggtttgaatctggtcgcttccggagggactgcaaaagctctcagggatgctggtctggcagtcagagatgtctctgagttgacgggatttcctgaaatgttggggggacgtgtgaaaactttgcatcctgcagtccatgctggaatcctagctcgtaatattccagaagataatgctgacatggccagacttgatttcaatcttataagagttgttgcctgcaatctctatccctttgtaaagacagtggcttctccaggtgtaactgttgaggaggctgtggagcaaattgacattggtggagtaaccttactgagagctgcagccaaaaaccacgctcgagtgacagtggtgtgtgaaccagaggactatgtggtggtgtccacggagatgcagagctccgagagtaaggacacctccttggagactagacgccagttagccttgaaggcattcactcatacggcacaatatgatgaagcaatttcagattatttcaggaaacagtacagcaaaggcgtatctcagatgcccttgagatatggaatgaacccacatcagacccctgcccagctgtacacactgcagcccaagcttcccatcacagttctaaatggagcccctggatttataaacttgtgcgatgctttgaacgcctggcagctggtgaaggaactcaaggaggctttaggtattccagccgctgcctctttcaaacatgtcagcccagcaggtgctgctgttggaattccactcagtgaagatgaggccaaagtctgcatggtttatgatctctataaaaccctcacacccatctcagcggcatatgcaagagcaagaggggctgataggatgtcttcatttggtgattttgttgcattgtccgatgtttgtgatgtaccaactgcaaaaattatttccagagaagtatctgatggtataattgccccaggatatgaagaagaagccttgacaatactttccaaaaagaaaaatggaaactattgtgtccttcagatggaccaatcttacaaaccagatgaaaatgaagttcgaactctctttggtcttcatttaagccagaagagaaataatggtgtcgtcgacaagtcattatttagcaatgttgttaccaaaaataaagatttgccagagtctgccctccgagacctcatcgtagccaccattgctgtcaagtacactcagtctaactctgtgtgctacgccaagaacgggcaggttatcggcattggagcaggacagcagtctcgtatacactgcactcgccttgcaggagataaggcaaactattggtggcttagacaccatccacaagtgctttcgatgaagtttaaaacaggagtgaagagagcagaaatctccaatgccatcgatcaatatgtgactggaaccattggcgaggatgaagatttgataaagtggaaggcactgtttgaggaagtccctgagttactcactgaggcagagaagaaggaatgggttgagaaactgactgaagtttctatcagctctgatgccttcttccctttccgagataacgtagacagagctaaaaggagtggtgtggcgtacattgcggctccctccggttctgctgctgacaaagttgtgattgaggcctgcgacgaactgggaatcatcctcgctcatacgaaccttcggctcttccaccactga

SEQ ID NO: 135 - DNA, 7647 bp, Homo sapiens
atgaatataaatgatggaggaagacgacgctttgaagataatgaacatacattacggatatatcctggggctatttcagaagggacaatctactgtccgattcctgccagaaaaaactccacagctgctgaggtgattgagtctcttataaacaaacttcatcttgacaaaacaaaatgttatgttctagcagaggtaaaggaatttggtggagaagaatggattctcaatccaacagattgtccagttcagcgaatgatgctgtggccccgaatggctctggaaaatcgcttaagtggagaggactaccgcttccttctgagagagaaaaaccttgatggatcaatccattatggtagcctgcagtcatggctacgggtaacagaagaacgtcgcaggatgatggaacggggttttcttccacagcctcaacagaaagactttgatgatttatgtagtttacctgatttgaatgagaaaactctcttagaaaacctacgaaatcgctttaagcatgaaaaaatttatacctatgttggcagtattctaatagttattaacccattcaagtttcttcctatttataaccccaaatatgtcaaaatgtatgataaccaccaactgggaaaacttgagccccacatttatgctgtggctgatgtagcttatcatgccatgcttcagcgcaaaaagaatcagtgcatcgtgatttcaggagagagtggttctgggaagactcaaagcacaaactttcttattcaccaccttactgctctcagtcagaaaggatttgccagtggagtagaacagattattcttggagctggaccagtacttgaggcctttggaaatgcaaagacagctcataataacaattcaagtcgttttgggaagtttattcaagtaaattaccaggaaacaggcactgtacttggtgcctatgttgaaaaatatctactggagaagtccagactcgtttatcaggagcataatgaacggaactatcatgtattctattacctcctggcaggagcaagtgaagatgagagatcagcattccatcttaagcaaccagaggaatatcattatctcaatcagataacaaagaaacccctcagacagagctgggatgattattgctatgactctgagccggattgcttcacggtggaaggagaagatttgagacatgactttgagcgcctacaacttgccatggaaatggtaggatttcttcccaagacacgaagacagattttctctcttctctcagccatactacatttgggtaatatctgttacaaaaagaagacataccgggatgactccattgatatctgtaatcctgaagttctgcctattgtctcagaattattagaggttaaagaagagatgctatttgaagcattagttacaaggaagacggtgacagtgggagaaaagcttattttgccatacaagttggcagaggctgtgacagtgaggaactccatggctaagtctctgtatagtgccctgtttgactggatagtttttcgaattaatcatgcacttctgaatagtaaagatttagagcataataccaagacattgtctattggtgttcttgatatttttgggtttgaagattatgaaaataacagctttgaacagttctgtattaattttgctaatgaacgtttacagcactactttaatcagcatatctttaaattggaacaagaggaatatagaactgaaggtatcagctggcacaacatagattacattgataatacctgctgcataaatcttattagcaaaaaaccaacaggactgcttcatcttttggatgaagaaagcaactttccacaggctacaaatcaaacattgctagacaagtttaagcatcaacatgaagataattcttacatcgaatttccagccgtgatggagcctgctttcattataaaacattatgctggaaaagtaaaatatggggtaaaggatttccgggaaaaaaatacagatcatatgcgcccagacattgtagctcttctgagaagcagcaagaatgcatttatctctgggatgattggaattgatcctgtagctgttttccgatgggcaattctccgagcttttttcagagccatggttgctttcagggaagctgggaaaagaaacattcacagaaaaactggacatgatgatacagcgccatgtgcaattttgaaaagtatggatagttttagctttctccaacacccagtccaccagaggagcttagagattctgcagagatgcaaggaagagaagtacagtataacccggaaaaatcccagaacacctctttctgatctccagggcatgaatgctctaaatgaaaaaaaccaacatgatacatttgatattgcctggaatggcagaactgggattcgccagagcagactatcaagtggcacctccttgcttgataaagatggaatatttgctaattcaactagcagcaaactcctggagagagcccatggaattctcacgagaaacaaaaatttcaaatccaagcctgcccttccaaagcacttgctagaagtaaattctttaaagcacctgacaagactgacactacaagatcgcattaccaagtctcttcttcatttacacaagaagaaaaaacctcccagcatcagtgcccagtttcaggcatcattaagcaagctaatggaaacacttggtcaagcagaaccatattttgtaaaatgcattcgctctaatgctgaaaagctgcccttaaggttcagtgatgtcttggtacttagacagcttcgatacaccgggatgctggaaacagttcgaattcgccaatcaggatacagctccaaatattctttccaggattttgtgagccacttccatgtacttcttccccgaaatattattccatccaaatttaacattcaggatttcttcaggaaaataaatcttaatccagataattatcaagttggaaaaaccatggtctttctaaaggagcaggaacgacagcacttacaagatctgcttcaccaagaggtgctccgcagaatcatattgttgcagcgatggttcagggtcttgctgtgtaggcagcatttcctccatctgagacaagcatctgttattatccagagattctggaggaattacctaaatcagaagcaagtcagagatgcagctgtgcagaaggatgcttttgttatggctagtgcagctgctcttctccaagcttcctggcgtgctcacttagagaggcagcggtacttggagttacgggctgcagccatcgttatccagcagaaatggagagattactataggcgcaggcacatggctgctatttgcatacaagcaagatggaaagcctacagggaaagtaaaaggtaccaagaacaaaggaaaaaaattatccttttgcaatcaacatgtagaggattcagagcaagacaaagatttaaagctttaaaagaacaaaggctaagagaaacaaagccagaagttggattggtgaatattaagggatatggatctctggaaattcagggttcagacccttcaggatgggaggattgttcttttgacaacagaataaaagccatagaggaatgtaaatctgtaatagagagtaatcgaattagccgtgaaagttcagtggactgcttgaaggagtcaccaaacaagcagcaggagagagcccaaagccagagtggtgtggacttgcaggaagatgtgcttgtaagagagagacccagatccttggaggatctccatcagaaaaaagtaggccgggctaagagagaaagtaggagaatgagagaactagagcaagctatatttagcttagaattgctgaaagttcgttctcttggtggtatttctccttcagaggatcgcagatggtctacagaattggtgcctgaaggccttcagtctccacggggtacacctgatagtgagagctctcaaggaagcttggaacttctgagctatgaggaaagccaaaagagcaaactagagtctgtcatttcagatgaaggagacttgcagtttccatcacctaagatatccagcagtccaaaatttgattcacgggacaatgccctcagtgcctcaaatgagactagcagtgcagagcatttgaaggatggaactatgaaggaaatggtggtctgcagttctgagtctattacctgtaaaccacagctgaaagactccttcatttcaaatagtctacctacttttttttatatcccccaacaagacccactgaaaacaaattcccaactagacacaagtatccaaagaaacaaactattggaaaatgaagacacagcgggggaagctcttactttggatatcaacagggaaactagaaggtatcactgctcaggaaaagatcagattgttccttctttgaatacagagtcttctaatcctgtgcttaagaagttagaaaagctaaacactgagaaggaagaaaggcaaaaacagttgcagcaacagaatgaaaaagagatgatggaacagattcgccagcaaacagatattttagagaaggagcgcaaagccttcaagacaattgaaaagccaagaattggagagtgtttggtggcaccatcttcctatcagtcaaagcaaagagtagagaggccatcctctctcctcagcttaaatacctcaaataagggagaacttaatgtactggggtccctatcattaaaagatgcagctcttgcccaaaaagacagttcctctgctcacttacccccaaaggaccgacctgtcaccgtgttctttgaaagaaaaggaagtccatgccaatctagtactgtcaaggaattatccaagacagacagaatgggcacccagctgaatgtagcctgtaaactctcaaataatcgcatttcaaaaagagaacactttaggccaactcagtcttacagccacaattctgatgacctttccagagagggaaatgctaggcccattttcttcactccaaaggacaatatgagtattccccttgtcagcaaagaagccttaaacagtaaaaatcctcaactccataaagaagatgaaccagcatggaaacctgtgaagttagctgggccaggccaaagagagacatcacagcgattttcgtcagttgatgaacaagcaaaacttcataagactatgtctcaaggagagattaccaagttggcagtgagacagaaggcttcagattcagatataagacctcagagagctaagatgagattctgggccaaagggaaacaaggggagaagaagactaccagagtgaaacctactacccagtcagaggtttcgccactctttgcaggcacagatgtgattccagctcatcagtttccagatgaattagctgcatatcacccaacacctcctttgagcccagaactgcccggcagttgccggaaggaattcaaagagaacaaagaaccttctccaaaggctaagcgcaagcgaagtgtgaagattagcaacgtggctttggattctatgcattggcaaaatgactctgtccagatcatagcaagtgtcagtgatttaaaaagcatggatgaatttcttctgaaaaaggtgaatgacctagataatgaagacagcaagaaggatacactagtggatgttgtatttaaaaaagccctgaaggaatttcggcagaatatcttcagcttttattcatctgcattggcgatggatgatgggaaaagcatacggtataaagacctctatgcactatttgaacagattctggaaaagacgatgaggcttgagcagcgtgattcactgggtgaatctccagtgagagtttgggtcaacacttttaaagtgtttttagatgaatatatgaatgaattcaagacttcagattgcacagccacaaaggtgccaaaaacagaaagaaagaaaagaaggaaaaaggaaactgatttggtggaagaacacaatggtcacatctttaaagccacccaatatagcatccctacatactgtgaatactgttcttctttgatatggataatggaccgagcctctgtttgcaaattatgcaagtatgcttgccataagaagtgctgtctgaaaaccacagccaagtgctctaaaaagtatgatccagagctgtcatctcgacaatttggggttgaactgtcccgtttgaccagtgaagaccgaactgttcctttagtagtggaaaagctcataaactacattgaaatgcatggactgtatacagaaggtatttatcgaaagtctggttcgactaataaaatcaaggagcttcggcagggtctagatacagatgctgagagtgtaaatctagatgactataacatacacgtcattgcaagtgtattcaaacaatggcttcgagatttgcccaatcctctcatgacctttgaactctatgaggaatttcttcgagctatgggccttcaggagaggaaggagacaatccgtggtgtatactctgtgattgatcaactctcccgaactcatctcaatacactggaacgcctcatctttcatctagtcaggattgctctgcaggaagacactaatcgaatgtctgctaatgctttggccattgtgtttgcgccctgcattctccgctgccctgacaccactgacccactacaaagtgtacaggacatcagtaagactaccacttgtgtggaactgattgttgtggaacaaatgaataaatacaaggctcgtctcaaagatatcagtagcttggaatttgctgagaataaggcaaagaccaggttgtcactgattcgtagatcaatgggaaaggggcgtattcgtcgaggaaactatccaggtccatcgtctcctgttgtagttcggttgccttctgtgtctgatgtctcagaggagaccttgactagtgaggcagccatggagactgacatcacagaacagcagcaagcagctatgcagcaggaggagagagtactgactgagcagattgagaacctacagaaggagaaggaggagctaacatttgagatgcttgtactggaaccccgtgcctctgatgatgaaacccttgagtctgaggcctccattgggactgctgatagctcagagaatttgaatatggagtctgaatatgctatctctgagaaatcagaaagaagcttagcccttagctccctgaagacagctggcaagtctgaaccttccagcaagttgcgaaagcaacttaaaaagcagcaagactctttagatgtcgtggactcttcggtctcctctttatgtctgtctaacacggcatcatctcatgggaccagaaaactatttcagatttattccaaatctccattctaccgagctgcctcaggtaatgaggccctgggaatggaaggaccattgggccagaccaaattcctggaagacaagcctcagttcatcagcagaggaaccttcaacccggaaaagggcaaacaaaaattaaagaatgtgaaaaactcacctcagaaaaccaaagagaccccagaggggacagtcatgtctggccgcagaaaaactgtggacccagactgcacctccaaccaacagctagcactctttggaaataatgaatttatggtctga

SEQ ID NO: 136 - DNA, 930 bp, Homo sapiens
atggaggagctcctgaggcgcgagctgggctgcagctctgtcagggccacgggccactcggggggcgggtgcatcagccagggccggagctacgacacggatcaaggacgagtgttcgtgaaagtgaaccccaaggcggaggccagaagaatgtttgaaggtgagatggcaagtttaactgccatcctgaaaacaaacacggtgaaagtgcccaagcccatcaaggttctggatgccccaggcggcgggagcgtgctggtgatggagcacatggacatgaggcatctgagcagtcatgctgcaaagcttggagcccagctggccgatttacaccttgataacaagaagcttggagagatgcgcctgaaggaggcgggcacagtggggagaggaggtgggcaggaggaacggccctttgtggcccggtttggatttgacgtggtgacgtgctgtggatacctcccccaggtgaatgactggcaggaggactgggtcgtgttctatgcccggcagcgcattcagccccagatggacatggtggagaaggagtctggggacagggaggccctccagctttggtctgctctgcagttaaagatccctgacctgttccgtgacctggagatcatcccagccttactccacggggacctctggggtggaaacgtagcagaggattcctctgggccggtgatttttgacccagcttctttctacggccactcggaatatgagctggcaatagctggcatgtttgggggctttagcagctccttttactccgcctaccacggcaaaatccccaaggccccaggattcgagaagcgccttcagttgtatcagctctttcactacttgaaccactggaatcattttggatcggggtacagaggatcctccctgaacatcatgaggaatctggtcaagtga

SEQ ID NO: 137 - DNA, 1158 bp, Homo sapiens
atgggtcgctggtgccagaccgtcgcgcgcgggcagcgcccccggacgtctgccccctcccgcgccggtgccctgctgctgctgcttctgttgctgaggtctgcaggttgctggggcgcaggggaagccccgggggcgctgtccactgctgatcccgccgaccagagcgtccagtgtgtccccaaggccacctgtccttccagccggcctcgccttctctggcagaccccgaccacccagacactgccctcgaccaccatggagacccaattcccagtttctgaaggcaaagtcgacccataccgctcctgtggcttttcctacgagcaggaccccaccctcagggacccagaagccgtggctcggcggtggccctggatggtcagcgtgcgggccaatggcacacacatctgtgccggcaccatcattgcctcccagtgggtgctgactgtggcccactgcctgatctggcgtgatgttatctactcagtgagggtggggagtccgtggattgaccagatgacgcagaccgcctccgatgtcccggtgctccaggtcatcatgcatagcaggtaccgggcccagcggttctggtcctgggtgggccaggccaacgacatcggcctcctcaagctcaagcaggaactcaagtacagcaattacgtgcggcccatctgcctgcctggcacggactatgtgttgaaggaccattcccgctgcactgtgacgggctggggactttccaaggctgacggcatgtggcctcagttccggaccattcaggagaaggaagtcatcatcctgaacaacaaagagtgtgacaatttctaccacaacttcaccaaaatccccactctggttcagatcatcaagtcccagatgatgtgtgcggaggacacccacagggagaagttctgctatgagctaactggagagcccttggtctgctccatggagggcacgtggtacctggtgggattggtgagctggggtgcaggctgccagaagagcgaggccccacccatctacctacaggtctcctcctaccaacactggatctgggactgcctcaacgggcaggccctggccctgccagccccatccaggaccctgctcctggcactcccactgcccctcagcctccttgctgccctctga

SEQ ID NO: 138 - DNA, 1743 bp, Homo sapiens
atggagaatcgagctctggatccagggactcgggactcctatggtgccaccagccacctccccaacaagggggccctggcgaaggtcaagaacaacttcaaagacttgatgtccaaactgacggagggccagtatgtgctgtgccggtggacagatggcctgtactacctcgggaagatcaagagggtcagcagctctaagcaaagctgcctcgtgactttcgaagataattccaaatactgggtcctatggaaggacatacagcatgccggtgttccaggagaggagcccaagtgcaacatctgcctagggaagacatcagggccgctgaatgagatcctcatctgcgggaagtgtggcctgggttaccaccagcagtgccacatccccatagcgggcagtgctgaccagcccctgctcacaccttggttctgccgacgctgcatcttcgcactggctgtgcggaaaggcggcgcgctgaagaagggcgccatcgccaggacgctgcaggccgtgaagatggtgctgtcctaccagcccgaggagctcgagtgggactcgccccatcgcaccaaccagcagcaatgctactgctactgcggcgggcccggagaatggtacctgcggatgctgcaatgttaccggtgcaggcagtggttccacgaggcctgcacccagtgcctcaatgagcccatgatgtttggagaccggttttacctgttcttctgctccgtgtgtaaccagggcccagagtacatcgagaggctgcccctgcgatgggtggatgtggttcacctggccctctataatctgggggtacagagcaagaagaagtactttgactttgaggagattctggcctttgtcaaccaccactgggagctcctgcagcttggcaagctcaccagcaccccagtgacagatcgaggaccacatctcctcaacgctctgaacagttataaaagccggttcctctgcggcaaggagatcaagaagaagaagtgcatcttccgcctgcgcatccgcgtcccacccaacccgccagggaagctgctgcctgacaaaggactgctgccaaatgagaacagcgcctcctctgagctgcgtaagagaggaaagagcaagcctggtttgttgcctcacgaattccagcagcagaaaaggcgagtttatagaagaaaaagatcaaagtttttgctggaagatgctattcccagtagtgacttcacctcagcctggagcaccaaccaccacctggctagcatatttgacttcacgctggatgaaattcaaagtttaaaaagtgccagctcaggccagaccttcttctcagatgtcgactccaccgacgctgccagcacctctggctctgcctccaccagcctctcctatgactccagatggacagtgggcagccgaaagaggaagctggcagccaaggcatacatgcccctgcgggcaaagcggtgggcagctgagctggatggacgctgcccctcggacagcagtgcagagggggcttcagtccccgagcggccagacgaaggcattgacagccacacatttgagagcatcagtgaagatgactcatccctgtcccacctcaagtcatctatcaccaactactttggtgcagctgggcggttggcctgtggggagaagtaccaggtgttggctcggagggtcacacctgagggcaaggttcagtacctggtggagtgggaagggaccaccccttactga

SEQ ID NO: 139 - DNA, 876 bp, Homo sapiens
atgctgcgccgcgaggcccgcctgcgccgcgagtacctgtaccgcaaggcccgggaggaggcgcagcgctcagcccaggagaggaaggagcggctgcggcgcgcgctggaagaaaaccgcctgattcccactgagttacgccgagaggctctggccttacaggggtccctggagtttgatgatgctggaggtgaaggtgtgaccagccacgtggatgatgaataccgatgggcaggagtcgaggatcccaaggttatgatcactacctcccgagaccccagttcccgcctcaagatgtttgcaaaggagctgaagctggtgttcccgggcgcccagcgaatgaaccgaggtcgacatgaagtgggggcactggtgcgagcctgcaaagccaacggcgtcaccgatctgctggtcgttcacgagcatcggggcacacctgtggggctcatcgtcagccacctgccctttggtcctactgcctacttcacgctgtgcaatgtggtcatgcggcatgacatcccagacctgggcaccatgtcggaggccaagccccacctcatcacacacggcttctcctcccgcctgggcaagcgggtctctgacatcctccgatacctatttcccgtgcccaaagatgacagccaccgggtcatcaccttcgcaaaccaggacgactacatatcattccggcaccatgtgtataagaagacagaccaccgcaacgtggagctcactgaggtcgggccccgctttgagctgaagctgtacatgatccgtctgggcacgctggagcaggaggccacagcagacgtggagtggcgctggcacccttacaccaataccgcacgcaagagagtcttcctgagcaccgagtga

SEQ ID NO: 140 - DNA, 996 bp, Homo sapiens
atggaggtgaccggggacgccggggtaccagaatctggcgagatccggactctaaagccgtgtctgctgcgccgcaactacagccgcgaacagcacggcgtggccgcctcctgcctcgaagacctgaggagcaaggcctgtgacattctggccattgataagtccctgacaccagtcaccctggtcctggcagaggatggcaccatagtggatgatgacgattactttctgtgtctaccttccaatactaagtttgtggcattggctagtaatgagaaatgggcatacaacaattcagatggaggtacagcttggatttcccaagagtcctttgatgtagatgaaacagacagcggggcagggttgaagtggaagaatgtggccaggcagctgaaagaagatctgtccagcatcatcctcctatcagaggaggacctccagatgcttgttgacgctccctgctcagacctggctcaggaactacgtcagagttgtgccaccgtccagcggctgcagcacacactccaacaggtgcttgaccaaagagaggaagtgcgtcagtccaagcagctcctgcagctgtacctccaggctttggagaaagagggcagcctcttgtcaaagcaggaagagtccaaagctgcctttggtgaggaggtggatgcagtagacacgggtatcagcagagagacctcctcggacgttgcgctggcgagccacatccttactgcactgagggagaagcaggctccagagctgagcttatctagtcaggatttggagttggttaccaaggaagaccccaaagcactggctgttgccttgaactgggacataaagaagacggagactgttcaggaggcctgtgagcgggagctcgccctgcgcctgcagcagacgcagagcttgcattctctccggagcatctcagcaagcaaggcctcaccacctggtgacctgcagaatcctaagcgagccagacaggatcccacatag

SEQ ID NO: 141 - DNA, 325 bp, Homo sapiens
  misc_feature (275)..(277): n is a, c, g, or t
gtgcccgaaccttggctgcctcactcgagccagcagatgccttcctgagaacaggcggcacccaggggccaaccacgcttggctctgacgtctctgtcctgcagactgtccccgcttccccacgcacctcctcccagctctgtggacgcctctttctaaaagagacgcactatccccttaccctggagaagcctgcagccctttggtgaggcgggggcattctccgactggattgcccttccaatccagtgtcaactgtggcgacagccgattannncattggaagtaaaccctcttgaataaacggctatccttaccaggtttg

SEQ ID NO: 142 - DNA, 1402 bp, Homo sapiens
ctcgcgtcacagccgggatgaagccgatcctactgcagggccatgagcggtccattacgcagattaagtataaccgcgaaggagacctcctctttactgtggccaaggaccctatcgtcaatgtatggtactctgtgaatggtgagaggctgggcacctacatgggccataccggagctgtgtggtgtgtggacgctgactgggacaccaagcatgtcctcactggctcagctgacaacagctgtcgtctctgggactgtgaaacaggaaagcagctggcccttctcaagaccaattcggctgtccggacctgcggttttgactttgggggcaacatcatcatgttctccacggacaagcagatgggctaccagtgctttgtgagcttttttgacctgcgggatccgagccagattgacaacaatgagccctacatgaagatcccttgcaatgactctaaaatcaccagtgctgtttggggacccctgggggagtgcatcatcgctggccatgagagtggagagctcaaccagtatagtgccaagtctggagaggtgttggtgaatgttaaggagcactcccggcagatcaacgacatccagttatccagggacatgaccatgtttgtgaccgcgtccaaggacaacacagccaagctttttgactccacaactcttgaacatcagaagactttccggacagaacgtcctgtcaactcagctgccctctcccccaactatgaccatgtggtcctgggcggtggtcaggaagccatggatgtaaccacaacctccaccaggattggcaagtttgaggccaggttcttccatttggcctttgaagaagagtttggaagagtcaagggtcactttggacctatcaacagtgttgccttccatcctgatggcaagagctacagcagcggcggcgaagatggttacgtccgtatccattacttcgacccacagtactttgaatttgagtttgaggcttaagaagctggatctcctgccgggcgtggttggctcatgcctgtaatcccaccactttttttttaaggcaggcggatcacctgaggtcaggagtttaagaccagcctgaccaacatggagaaacctcgtctctactaaaaatacaaaaattagccaggcatggtggcacacgcctatagtcccagctactcaggaggctgaggcaggagaatcacttgaacccaggaggcagaggttgcagtgagctgagatcacgtcattgcactccatcctgagccacaagagcaaaactccgtctcaaaaaaaaaaaagaagaaggtggatctccaaccaggccagagaagattctcacagaaggttttgaactctaagaaataaattggtttggtaataaatggcttctggtcaga

SEQ ID NO: 143 - DNA, 978 bp, Homo sapiens
atggcggcttcctgtgttctactgcacactgggcagaagatgcctctgattggtctgggtacctggaagagtgagcctggtcaggtaaaagcagctgttaagtatgcccttagcgtaggctaccgccacattgattgtgctgctatctacggcaatgagcctgagattggggaggccctgaaggaggacgtgggaccaggcaaggcggtgcctcgggaggagctgtttgtgacatccaagctgtggaacaccaagcaccaccccgaggatgtggagcctgccctccggaagactctggctgacctccagctggagtatctggacctgtacctgatgcactggccttatgcctttgagcggggagacaaccccttccccaagaatgctgatgggactatatgctacgactccacccactacaaggagacttggaaggctctggaggcactggtggctaaggggctggtgcaggcgctgggcctgtccaacttcaacagtcggcagattgatgacatactcagtgtggcctccgtgcgtccagctgtcttgcaggtggaatgccacccatacttggctcaaaatgagctaattgcccactgccaagcacgtggcctggaggtaactgcttatagccctttgggctcctctgatcgtgcatggcgtgatcctgatgagcctgtcctgctggaggaaccagtagtcctggcattggctgaaaagtatggccgatctccagctcagatcttgctcaggtggcaggtccagcggaaagtgatctgcatccccaaaagtatcactccttctcgaatccttcagaacatcaaggtgtttgacttcacctttagcccagaagagatgaagcagctaaatgccctgaacaaaaattggagatatattgtgcctatgcttacggtggatgggaagagagtcccaagggatgcagggcatcctctgtacccctttaatgacccgtactga

SEQ ID NO: 144 - DNA, 951 bp, Homo sapiens
atggcaagccgtctcctgctcaacaacggcgccaagatgcccatcctggggttgggtacctggaagtcccctccagggcaggtgactgaggccgtgaaggtggccattgacgtcgggtaccgccacatcgactgtgcccatgtgtaccagaatgagaatgaggtgggggtggccattcaggagaagctcagggagcaggtggtgaagcgtgaggagctcttcatcgtcagcaagctgtggtgcacgtaccatgagaagggcctggtgaaaggagcctgccagaagacactcagcgacctgaagctggactacctggacctctaccttattcactggccgactggctttaagcctgggaaggaatttttcccattggatgagtcgggcaatgtggttcccagtgacaccaacattctggacacgtgggcggccatggaagagctggtggatgaagggctggtgaaagctattggcatctccaacttcaaccatctccaggtggagatgatcttaaacaaacctggcttgaagtataagcctgcagttaaccagattgagtgccacccatatctcactcaggagaagttaatccagtactgccagtccaaaggcatcgtggtgaccgcctacagccccctcggctctcctgacaggccctgggccaagcccgaggacccttctctcctggaggatcccaggatcaaggcgatcgcagccaagcacaataaaactacagcccaggtcctgatccggttccccatgcagaggaacttggtggtgatccccaagtctgtgacaccagaacgcattgctgagaactttaaggtctttgactttgaactgagcagccaggatatgaccaccttactcagctacaacaggaactggagggtctgtgccttgttgagctgtacctcccacaaggattaccccttccatgaagagttttga

SEQ ID NO: 145 - DNA, 477 bp, Homo sapiens
atgtcggggatcgccctcagcagactcgcccaggagaggaaagcatggaggaaagaccacccatttggtttcgtggctgtcccaacaaaaaatcccgatggcacgatgaacctcatgaactgggagtgcgccattccaggaaagaaagggactccgtgggaaggaggcttgtttaaactacggatgcttttcaaagatgattatccatcttcgccaccaaaatgtaaattcgaaccaccattatttcacccgaatgtgtacccttcggggacagtgtgcctgtccatcttagaggaggacaaggactggaggccagccatcacaatcaaacagatcctattaggaatacaggaacttctaaatgaaccaaatatccaagacccagctcaagcagaggcctacacgatttactgccaaaacagagtggagtacgagaaaagggtccgagcacaagccaagaagtttgcgccctcataa

SEQ ID NO: 146 - DNA, 1005 bp, Homo sapiens
atgaaaatggcaagttccctggctttccttctgctcaactttcatgtctccctcctcttggtccagctgctcactccttgctcagctcagttttctgtgcttggaccctctgggcccatcctggccatggtgggtgaagacgctgatctgccctgtcacctgttcccgaccatgagtgcagagaccatggagctgaagtgggtaagttccagcctaaggcaggtggtgaacgtgtatgcagatggaaaggaagtggaagacaggcagagtgcaccgtatcgagggagaacttcgattctgcgggatggcatcactgcagggaaggctgctctccgaatacacaacgtcacagcctctgacagtggaaagtacttgtgttatttccaagatggtgacttctatgaaaaagccctggtggagctgaaggttgcagcactgggttctaatcttcacgtcgaagtgaagggttatgaggatggagggatccatctggagtgcaggtccaccggctggtacccccaaccccaaatacagtggagcaacgccaagggagagaacatcccagctgtggaagcacctgtggttgcagatggagtgggcctatatgaagtagcagcatctgtgatcatgagaggcggctccggggagggtgtatcctgcatcatcagaaattccctcctcggcctggaaaagacagccagcatttccatcgcagaccccttcttcaggagcgcccagccctggatcgcagccctggcagggaccctgcctatcttgctgctgcttctcgccggagccagttacttcttgtggagacaacagaaggaaataactgctctgtccagtgagatagaaagtgagcaagagatgaaagaaatgggatatgctgcaacagagcgggaaataagcctaagagagagcctccaggaggaactcaagaggaaaaaaatccagtacttgactcgtggagaggagtcttcgtccgataccaataagtcagcctga

SEQ ID NO: 147 - DNA, 543 bp, Homo sapiens
atggccgactccgagctgcagctggttgagcagcggatccgcagcttccccgacttccccaccccaggcgtggtattcagggacatctcgcccgtcctgaaggaccccgcctccttccgcgccgccatcggcctcctggcgcgacacctgaaggcgacccacgggggccgcatcgactacatcgcaggcctagactcccgaggcttcctctttggcccctccctggcccaggagcttggactgggctgcgtgctcatccgaaagcgggggaagctgccaggccccactctgtgggcctcctattccctggagtacgggaaggctgagctggagattcagaaagacgccctggagccaggacagagggtggtcgtcgtggatgatctgctggccactggtggaaccatgaacgctgcctgtgagctgctgggccgcctgcaggctgaggtcctggagtgcgtgagcctggtggagctgacctcgcttaagggcagggagaagctggcacctgtacccttcttctctctcctgcagtatgagtga

SEQ ID NO: 148 - DNA, 957 bp, Homo sapiens
atgccgaagcgtgggaaaaagggagcggtggcggaagacggggatgagctcaggacagagccagaggccaagaagagtaagacggccgcaaagaaaaatgacaaagaggcagcaggagagggcccagccctgtatgaggaccccccagatcagaaaacctcacccagtggcaaacctgccacactcaagatctgctcttggaatgtggatgggcttcgagcctggattaagaagaaaggattagattgggtaaaggaagaagccccagatatactgtgccttcaagagaccaaatgttcagagaacaaactaccagctgaacttcaggagctgcctggactctctcatcaatactggtcagctccttcggacaaggaagggtacagtggcgtgggcctgctttcccgccagtgcccactcaaagtttcttacggcataggcgatgaggagcatgatcaggaaggccgggtgattgtggctgaatttgactcgtttgtgctggtaacagcatatgtacctaatgcaggccgaggtctggtacgactggagtaccggcagcgctgggatgaagcctttcgcaagttcctgaagggcctggcttcccgaaagccccttgtgctgtgtggagacctcaatgtggcacatgaagaaattgaccttcgcaaccccaaggggaacaaaaagaatgctggcttcacgccacaagagcgccaaggcttcggggaattactgcaggctgtgccactggctgacagctttaggcacctctaccccaacacaccctatgcctacaccttttggacttatatgatgaatgctcgatccaagaatgttggttggcgccttgattactttttgttgtcccactctctgttacctgcattgtgtgacagcaagatccgttccaaggccctcggcagtgatcactgtcctatcaccctatacctagcactgtga

SEQ ID NO: 149 - DNA, 807 bp, Homo sapiens
atggcggctgtgagggtcctggtggcctcgaggctcgctgcggcatctgcattcacgtccctgtcccccggcggtcggacgccttcccagcgcgcagcccttcacctctccgtgccgcgccccgcggccagggtcgcgctggtgctgtctggatgcggagtctacgatgggaccgagatccacgaggcctcggcgatcctggtgcacctgagccgtggaggggctgaagtccagatctttgctcctgacgtccctcagatgcacgtgattgaccacaccaaggggcagccgtccgaaggcgagagcaggaatgttttgaccgagtctgcgaggatcgcccgtggcaaaatcacagacctggccaacctcagtgcagccaaccatgatgctgccatctttccaggaggctttggagcggctaaaaacctgagcacgtttgccgtggacgggaaagattgcaaggtgaataaagaagtggagcgtgtcctgaaggagttccaccaggccgggaagcccatcggcttgtgctgcattgcacctgtcctcgcggccaaggtgctcagaggcgtcgaggtgactgtgggccacgagcaggaggaaggtggcaagtggccttatgccgggaccgcagaggccatcaaggccctgggtgccaagcactgcgtgaaggaagtggtcgaagctcacgtggaccagaaaaacaaggtggtcacgaccccagccttcatgtgcgagacggcactccactacatccatgatgggatcggagccatggtgaggaaggtgctggaactcactggaaagtga

SEQ ID NO: 150 - DNA, 2160 bp, Homo sapiens
atggcactgaaggactacgcgctagagaaggaaaaggttaagaagttcttacaagagttctaccaggatgatgaactcgggaagaagcagttcaagtatgggaaccagttggttcggctggctcatcgggaacaggtggctctgtatgtggacctggacgacgtagccgaggatgaccccgagttggtggactcaatttgtgagaatgccaggcgctacgcgaagctctttgctgatgccgtacaagagctgctgcctcagtacaaggagagggaagtggtaaataaagatgtcctggacgtttacattgagcatcggctaatgatggagcagcggagtcgggaccctgggatggtccgaagcccccagaaccagtaccctgctgaactcatgcgcagatttgagctgtattttcaaggccctagcagcaacaagcctcgtgtgatccgggaagtgcgggctgactctgtggggaagttggtaactgtgcgtggaatcgtcactcgtgtctctgaagtcaaacccaagatggtggtggccacttacacttgtgaccagtgtggggcagagacctaccagccgatccagtctcccactttcatgcctctgatcatgtgcccaagccaggagtgccaaaccaaccgctcaggagggcggctgtatctgcagacacggggctccagattcatcaaattccaggagatgaagatgcaagaacatagtgatcaggtgcctgtgggaaatatccctcgtagtatcacggtgctggtagaaggagagaacacaaggattgcccagcctggagaccacgtcagcgtcactggtattttcttgccaatcctgcgcactgggttccgacaggtggtacagggtttactctcagaaacctacctggaagcccatcggattgtgaagatgaacaagagtgaggatgatgagtctggggctggagagctcaccagggaggagctgaggcaaattgcagaggaggatttctacgaaaagctggcagcttcaatcgccccagaaatatacgggcatgaagatgtgaagaaggcactgctgctcctgctagtcgggggtgtggaccagtctcctcgaggcatgaaaatccggggcaacatcaacatctgtctgatgggggatcctggtgtggccaagtctcagctcctgtcatacattgatcgactggcgcctcgcagccagtacacaacaggccggggctcctcaggagtggggcttacggcagctgtgctgagagactccgtgagtggagaactgaccttagagggtggggccctggtgctggctgaccagggtgtgtgctgcattgatgagttcgacaagatggctgaggccgaccgcacagccatccacgaggtcatggagcagcagaccatctccattgccaaggccggcattctcaccacactcaatgcccgctgctccatcctggctgccgccaaccctgcctacgggcgctacaaccctcgccgcagcctggagcagaacatacagctacctgctgcactgctctcccggtttgacctcctctggctgattcaggaccggcccgaccgagacaatgacctacggttggcccagcacatcacctatgtgcaccagcacagccggcagcccccctcccagtttgaacctctggacatgaagctcatgaggcgttacatagccatgtgccgcgagaagcagcccatggtgccagagtctctggctgactacatcacagcagcatacgtggagatgaggcgagaggcttgggctagtaaggatgccacctatacttctgcccggaccctgctggctatcctgcgcctttccactgctctggcacgtctgagaatggtggatgtggtggagaaagaagatgtgaatgaagccatcaggctaatggagatgtcaaaggactctcttctaggagacaaggggcagacagctaggactcagagaccagcagatgtgatatttgccaccgtccgtgaactggtctcagggggccgaagtgtccggttctctgaggcagagcagcgctgtgtatctcgtggcttcacacccgcccagttccaggcggctctggatgaatatgaggagctcaatgtctggcaggtcaatgcttcccggacacggatcacttttgtctga

SEQ ID NO: 151 - DNA, 5367 bp, Homo sapiens
atgaaaagaaaagaaagaattgccaggcgcctggaagggattgaaaatgacactcagcccatcctcttgcagagctgcacaggattggtgactcaccgcctgctggaggaagacacccctcgatacatgagagccagcgaccctgccagcccccacatcggccgatcaaatgaagaggaggaaacttctgattcttctctagaaaagcaaactcgatccaaatactgcacagaaacctccggtgtccacggtgactcaccctatggttcgggtaccatggacacccacagtctggagtccaaagccgaaagaattgcaaggtacaaagcagaaagaaggcgacagctggcagagaagtatgggctgactctggatcccgaggccgactccgagtatttatcccgctataccaagtccaggaaggagcctgatgctgtcgagaagcggggaggaaaaagtgacaaacaggaagagtcaagcagagatgctagttctctgtaccccgggaccgagacgatggggctcaggacctgtgccggtgaatccaaggactatgccctccatgtgggtgacggctcttccgacccggaggtgctgctgaacatagaaaaccaaagacgaggtcaagagctgagtgccacccggcaggcccatgacctgtccccagcagccgagagttcctcgaccttctctttctctgggcgagactcctccttcactgaagtgccacggtcccccaagcacgcccacagctcctccctgcagcaggcagcctcccggagcccctcctttggtgacccacagctatcccctgaggcccgacccaggtgcacttcacattcagaaacgccaactgtcgatgatgaagaaaaggtggatgaacgagccaagctgagcgtcgccgccaagaggttgcttttcagggagatggaaaaatcttttgatgaacaaaatgttccaaagcgacgctcaagaaacacagctgtggagcagaggctacgccgtctgcaggacaggtccctcacccagcccatcaccactgaagaggtggtcatcgcagccacattgcaggcctctgctcaccaaaaggccttagccaaggaccagacaaatgagggcaaagagcttgctgagcaaggagaacctgattcctccactctaagcttggccgaaaagttggccttgtttaacaaattgtcccagccagtctcaaaagcgatttctacccggaacagaatagacacgagacagaggagaatgaacgctcgctatcaaactcagccagtcacactgggagaggtggagcaggtgcagagtggaaagctcattcctttctcacctgccgtgaacacatcagtgtctaccgtagcatccacggttgctccaatgtatgccggagatcttcgcacaaagccacctcttgaccacaatgcaagtgccactgactataagttttcttcttcaatagaaaattcggactctccagttagaagcattctgaaatcgcaagcttggcagcctttggtagagggtagcgagaacaagggaatgttgagagaatatggagagacagaaagcaagagagctttgacaggtcgagacagtgggatggagaagtatgggtcctttgaggaagcagaagcatcctaccccatcctgaaccgagccagggaaggagacagccataaggaatctaaatatgctgttcccagaagaggaagcctggaacgggcgaaccctcccatcacccacctcggggatgaaccgaaggaattttccatggctaaaatgaatgcacaaggaaacttggacttgagggacaggctgccctttgaagagaaggtggaggtggagaatgttatgaaaaggaagttttcactaagagcggcagagttcggggagcccacttccgagcagacggggacagctgctgggaaaactattgctcaaaccacagcccccgtgtcctggaagccccaggattcttcggaacagccacaggagaagctctgcaagaatccatgtgcgatgtttgctgctggagagatcaaaacgccgacaggggagggccttcttgactcacccagcaaaaccatgtctattaaagaaagattggcactgttgaagaaaagcggggaggaagattggagaaacagactcagcaggaggcaggagggcggcaaggcgccggccagcagcctgcacacccaggaagcagggcggtccctcatcaagaagcgggtcacagaaagtcgagagagccaaatgacgattgaggagaggaagcagctcatcactgtgagagaggaggcctggaagacgagaggcagaggagcggccaacgactcgacccagttcactgtggctggcaggatggtgaagaaaggtttggcgtcacctactgccataaccccagtagcctcacccatttgcggtaaaacaagaggcaccacacccgtttccaaacccctggaagatatcgaagccagaccagatatgcagttagaatcggacctgaagttggacaggctggaaacctttctaagaaggctgaataacaaagttggcgggatgcacgaaacggtgctcactgtcaccggcaaatctgtgaaggaggtgatgaagccagatgatgatgaaacctttgccaaattttaccgcagcgtggattataatatgccaagaagtcctgtggagatggatgaggacttcgatgtcattttcgatccttatgcacccaaattgacgtcttccgtggccgagcacaagcgggcagttaggcccaagcgccgggttcaggcctccaaaaaccccctgaaaatgctggcggcaagagaagatctccttcaggaatacactgagcagagattaaacgttgccttcatggagtcaaagcggatgaaagtagaaaagatgtcttccaactccaacttctcagaagtcaccctggcgggtttagccagtaaagaaaacttcagcaacgtcagcctgcggagcgtcaacctgacggaacagaactctaacaacagcgccgtgccctacaagaggctgatgctgttgcagattaaaggaagaagacatgtgcagaccaggctggtggaacctcgagcttcggcgctcaacagtggggactgcttcctcctgctctctccccactgctgcttcctgtgggtaggagagtttgcaaacgtcatagaaaaggcgaaggcctcagaacttgcaactttaattcagacaaagagggaacttggttgtagagctacttatatccaaaccattgaagaaggaattaatacacacactcatgcagccaaagacttctggaagcttctgggtggccaaaccagttaccaatctgctggagacccaaaagaagatgaactctatgaagcagccataatagaaactaactgcatttaccgtctcatggatgacaaacttgttcctgatgacgactactgggggaaaattccgaagtgctcccttctgcaacccaaagaggtactggtgtttgattttggtagtgaagtttacgtatggcatgggaaagaagtcacattagcacaacgaaaaatagcatttcagctggcaaagcacttatggaatggaacctttgactatgagaactgtgacatcaatcccctggatcctggagaatgcaatccgcttatccccagaaaaggacaggggcggcccgactgggcgatatttgggagacttactgaacacaatgagacgattttgttcaaagagaagtttctggattggacggaactgaagagatcgaatgagaagaaccccggggaacttgcccagcacaaggaagaccccaggactgatgtcaaggcatacgatgtgacacggatggtgtccatgccccagacgacagcaggcaccatcctggacggagtgaacgtcggccgtggctatggcctggtggaaggacacgacaggaggcagtttgagatcaccagcgtttccgtggatgtctggcacatcctggaattcgactatagcaggctccccaaacaaagcatcgggcagttccatgagggggatgcctatgtggtcaagtggaagttcatggtgagcacggcagtgggaagtcgccagaagggagagcactcggtgagggcagccggcaaagagaagtgcgtctacttcttctggcaaggccggcactccaccgtgagtgagaagggcacgtcggcgctgatgacggtggagctggacgaggaaaggggggcccaggtccaggttctccagggaaaggagcccccctgtttcctgcagtgtttccagggggggatggtggtgcactcggggaggcgggaagaggaagaagaaaatgtgcaaagtgagtggcggctgtactgcgtgcgtggagaggtgcccgtggaagggaatttgctggaagtggcctgtcactgtagcagcctgaggtccagaacttccatggtggtgcttaacgtcaacaaggccctcatctacctgtggcacggatgcaaagcccaggcccacacgaaggaggtcggaaggaccgctgcgaacaagatcaaggaacaatgtcccctggaagcaggactgcatagtagcagcaaagtcacaatacacgagtgtgatgaaggctccgagccactcggattctgggatgccttaggaaggagagacaggaaagcctacgattgcatgcttcaagatcctggaagttttaacttcgcgccccgcctgttcatcctcagcagctcctctggggattttgcagccacagagtttgtgtaccctgcccgagccccctctgtggtcagttccatgcccttcctgcaggaagatctgtacagcgcgccccagccagcacttttccttgttgacaatcaccacgaggtgtacctctggcaaggctggtggcccatcgagaacaagatcactggttccgcccgcatccgctgggcctccgaccggaagagtgcgatggagactgtgctccagtactgcaaaggaaaaaatctcaagaaaccagcccccaagtcttaccttatccacgctggtctggagcccctgacattcaccaatatgtttcccagctgggagcacagagaggacatcgctgagatcacagagatggacacggaagtttccaatcagatcaccctcgtggaagacgtcttagccaagctctgtaaaaccatttacccgctggccgacctcctggccaggccactcccggagggggtcgatcctctgaagcttgagatctatctcaccgacgaagacttcgagtttgcactagacatgacgagggatgaatacaacgccctgcccgcctggaagcaggtgaacctgaagaaagcaaaaggcctgttctga

SEQ ID NO: 152 - DNA, 2154 bp, Homo sapiens
atgtcccgaagaagccagcgcctcacgcgctactcccagggtgacgatgacggcagcagcagcagcggagggagctcggtggctgggagtcagagcaccctgtttaaagacagtcctctcaggaccttgaagaggaaatccagcaacatgaagcgcctgtccccagcgccacagctgggcccgtcctctgatgcacacacctcctactacagtgagtcgctggtccacgagtcctggttcccacccaggagctccctggaggaactgcatggtgacgccaactggggtgaggacctgcgggtgcggaggaggagaggcacgggtggctcagagagcagcagggccagcgggcttgtggggcgcaaggccaccgaggacttcctgggctcttcctcgggctactcctctgaggacgactacgtgggctactcggatgtggaccagcagagttccagctcgcggctccgaagcgccgtctcacgggcgggctccttactctggatggtggccacttcgccaggccggctcttcagacttctctactggtgggctggcaccacctggtaccgcctgaccacagctgcctccctccttgacgtcttcgttttaaccaggcgcttctcgtccctgaagacgttcctctggttcctgctgccgctgctcttgctgacgtgcctgacgtatggtgcttggtatttctacccctatgggctgcagacattccaccctgctttggtttcctggtgggcagcgaaggacagcaggaggccggatgagggctgggaagccagagactcatcgccacatttccaggctgagcagcgtgttatgtcccgggtacactctctggagcggcgtctggaagctcttgctgctgaattttcctccaactggcagaaggaggccatgcggctggaacgtctggagctgcggcaaggggctcctggccagggaggtggtggtggcctgagccacgaggacaccctggcgctgctggaggggctagtgagccgccgtgaagctgccctgaaggaggatttccgcagggaaactgctgctcgcatccaggaagaactgtctgccctgagagcagagcatcagcaagactcagaagacctcttcaagaagatcgtccgggcctcccaggagtccgaggctcgcatccagcagctgaagtcagagtggcaaagcatgacccaggagtccttccaggagagctctgtgaaggagctgaggcggctggaggaccagctggccggcctgcagcaggagctggcggctctggcactgaagcagagctcggtggcggaagaagtgggcctgctgccccagcagatccaggccgtgcgggacgacgtggaatctcagttcccggcctggatcagtcagttccttgcccgaggtggagggggccgcgtggggctccttcagagagaggagatgcaagctcagctgcgagagctggagagcaagatcctcacccatgtggcagagatgcagggcaagtcggccagggaagccgcggcctccctgagcctgacgctgcagaaagaaggtgtgattggagtgacagaggagcaggtgcaccacatcgtgaagcaggccctgcagcgctacagtgaggaccgcatcgggctggcagactacgccctggagtcaggaggggccagcgtcatcagcacccgatgttctgagacctacgagaccaagacggccctcctcagcctcttcggcatccccctgtggtaccactcccagtcaccccgagtcatcctccagccagatgtgcacccaggcaactgctgggccttccaggggccacaaggcttcgccgtggtccgcctctctgcccgcatccgccccacagccgttaccttagagcatgtgcccaaggccttgtcacccaacagcactatctccagtgcccccaaggacttcgccatctttgggtttgacgaagacctgcagcaggaggggacactccttggcaagttcacttacgatcaggacggcgagcctattcagacgtttcactttcaggcccctacgatggccacgtaccaggtggtggagctgcggatcctgactaactggggccaccccgagtacacctgcatctaccgcttcagagtgcatggggagcccgcccactag

SEQ ID NO: 153 - DNA, 1581 bp, Homo sapiens
atggggcacctctcagccccacttcacagagtgcgtgtaccctggcaggggcttctgctcacagcctcacttctaaccttctggaacccgcccaccactgcccagctcactactgaatccatgccattcaatgttgcagaggggaaggaggttcttctccttgtccacaatctgccccagcaactttttggctacagctggtacaaaggggaaagagtggatggcaaccgtcaaattgtaggatatgcaataggaactcaacaagctaccccagggcccgcaaacagcggtcgagagacaatataccccaatgcatccctgctgatccagaacgtcacccagaatgacacaggattctacaccctacaagtcataaagtcagatcttgtgaatgaagaagcaactggacagttccatgtatacccggagctgcccaagccctccatctccagcaacaactccaaccctgtggaggacaaggatgctgtggccttcacctgtgaacctgagactcaggacacaacctacctgtggtggataaacaatcagagcctcccggtcagtcccaggctgcagctgtccaatggcaacaggaccctcactctactcagtgtcacaaggaatgacacaggaccctatgagtgtgaaatacagaacccagtgagtgcgaaccgcagtgacccagtcaccttgaatgtcacctatggcccggacacccccaccatttccccttcagacacctattaccgtccaggggcaaacctcagcctctcctgctatgcagcctctaacccacctgcacagtactcctggcttatcaatggaacattccagcaaagcacacaagagctctttatccctaacatcactgtgaataatagtggatcctatacctgccacgccaataactcagtcactggctgcaacaggaccacagtcaagacgatcatagtcactgagctaagtccagtagtagcaaagccccaaatcaaagccagcaagaccacagtcacaggagataaggactctgtgaacctgacctgctccacaaatgacactggaatctccatccgttggttcttcaaaaaccagagtctcccgtcctcggagaggatgaagctgtcccagggcaacaccaccctcagcataaaccctgtcaagagggaggatgctgggacgtattggtgtgaggtcttcaacccaatcagtaagaaccaaagcgaccccatcatgctgaacgtaaactataatgctctaccacaagaaaatggcctctcacctggggccattgctggcattgtgattggagtagtggccctggttgctctgatagcagtagccctggcatgttttctgcatttcgggaagaccggcagggcaagcgaccagcgtgatctcacagagcacaaaccctcagtctccaaccacactcaggaccactccaatgacccacctaacaagatgaatgaagttacttattctaccctgaactttgaagcccagcaacccacacaaccaacttcagcctccccatccctaacagccacagaaataatttattcagaagtaaaaaagcagtaa

SEQ ID NO: 154 - DNA, 5943 bp, Homo sapiens
atgaacccaactaatcctttcagtgggcagcagcctagtgctttttcggcgtcttctagtaatgtaggaacacttccatctaagccgccatttcgatttggtcaaccttctctttttggacaaaacagtaccttatctgggaagagctcgggattttcacaggtatccagctttccagcgtcttctggagtaagtcattcctcttcagtgcaaacattagggttcacccaaacctcaagtgttggacccttttctggacttgagcacacttccacctttgtggctacctctgggccttcaagttcatctgtgctgggaaacacaggatttagttttaaatcacccaccagtgttggggctttcccaagcacttctgcttttggacaagaagctggagaaatagtgaactctggttttgggaaaacagaattcagctttaaacctctggaaaatgcagtgttcaaaccaatactgggggctgaatctgagccagagaaaacccagagccaaattgcttctgggttttttacattttcccacccaattagtagtgcacctggaggcctggcccctttctcttttcctcaagtaacaagtagttcagctaccacttcaaattttaccttttcaaaacctgttagtagtaataattcattatctgcctttacccctgctttgtcaaaccaaaatgtagaggaagagaagagaggacctaagtcaatatttggaagttctaataatagcttcagtagcttccctgtatcatctgcggttttgggcgaacctttccaggctagcaaagcaggtgtcaggcaggggtgtgaagaagctgtttcccaggtggaaccacttcccagcctaatgaaaggactgaaaaggaaggaggaccaggatcgctccccaaggagacatggccacgagccagcagaagattcggatcctctgtcccggggcgatcatcctccagacaaacgacctgtccgcctgaatcgaccccggggaggtactttatttggtcggacgatacaggatgttttcaaaagcaataaggaagtaggtcgtctgggcaacaaggaggccaaaaaggaaactggctttgttgagtctgcagaaagtgaccacatggctatcccaggagggaatcagtctgtcctggcaccttcccggattccaggtgtgaataaagaggaagaaactgaaagtagagagaagaaagaagattctctaagaggaactccggcgcgtcagagtaacagaagcgagagcacagacagtcttgggggcttgtctccctctgaagtcacagccatccagtgcaagaacatccctgactacctcaacgacaggaccattctggagaaccattttggcaaaattgctaaagtgcagcgcatctttaccaggcgcagcaaaaagcttgcagtggtacatttctttgatcatgcatctgcagccctggctagaaagaaggggaaaagtttgcataaagacatggctatcttttggcacaggaagaaaataagccccaataagaaacccttttccctgaaggagaagaaaccaggtgacggtgaagtcagcccgagcacagaggatgcaccctttcagcactctcctcttggcaaggccgcagggaggactggtgctagcagcctcctgaataaaagctctccagtgaagaagccaagtcttctaaaggcccaccaattcgagggagactcttttgactcagcctccgagggctccgagggcctcgggccatgtgtgctctccctcagtaccctgataggcactgtggctgagacatccaaggagaagtaccgcctgcttgaccagagagacaggatcatgcggcaagctcgggtgaagagaaccgatctggacaaagcgaggacttttgttggcacctgcctggatatgtgtcctgagaaggagaggtacatgcgggagacccgtagccagctgagcgtgttcgaagtggtcccagggactgaccaggtggaccacgcagcagctgtgaaagagtacagtcggtcctcggcggatcaggaggagcccctgccccacgagctgcggcccttgccagtgctcagcaggaccatggactacctggtgacccagatcatggaccagaaggagggcagcctgcgggattggtatgacttcgtgtggaaccgcacgcgtggcatacggaaggatatcacgcagcagcacctctgtgaccccctgacggtgtccctgattgagaagtgcacccggtttcacatccactgtgcccacttcatgtgtgaggagcccatgtcctcctttgatgccaagatcaataatgagaacatgaccaagtgcctgcagagcctgaaggagatgtaccaggacctgagaaacaagggtgtcttctgtgccagcgaagcggagttccagggctacaatgttctgctcagtctcaacaagggagacatcctaagagaagtacaacagttccatcctgctgttagaaactcatctgaggtgaaatttgctgttcaggcttttgctgcattgaacagtaataattttgtgagatttttcaaactggtccagtcagcttcttacctgaacgcttgtcttttacactgttacttcagtcagatccgcaaggatgctctccgggcgctcaactttgcgtacacggtgagcacacagcgatctaccatctttcccctggatggtgtggtgcgcatgctgctgttcagagactgtgaagaggccaccgacttcctcacctgccacggcctcaccgtttccgacggctgtgtggagctgaaccggtctgcattcctggaaccagagggattatccaagaccaggaagtcggtgtttattactaggaagctgacggtgtcagtcggggaaattgtgaacggagggccattgccccccgtccctcgtcatacccctgtgtgcagcttcaactcccagaacaagtacatcggggagagcctggccgcggagctgcccgtcagcacccagagacccggctccgacacagtgggcggagggagaggagaggagtgtggtgtagagccggatgcacccctgtccagtctcccacagtctctaccagcccctgcgccctcaccagtgcctctgcctcctgtcctggcactgaccccgtctgtggcgcccagcctcttccagctgtctgtgcagcctgaaccaccgcctccagagcccgtgcccatgtactctgacgaggacctggcgcaggtggtggacgagctcatccaggaggccctgcagagggactgtgaggaagttggctctgcgggtgctgcctacgcagctgccgccctgggtgtttctaatgctgctatggaggatttgttaacagctgcaaccacgggcattttgaggcacattgcagctgaagaagtgtctaaggaaagagagcgaagggagcaggagaggcagcgggctgaagaggaaaggttgaaacaagagagagagctggtgttaagtgagctgagccagggcctggccgtggagctgatggaacgcgtgatgatggagtttgtgagggaaacctgctcccaggagttgaagaatgcagtagagacagaccagagggtccgtgtggcccgttgctgtgaggatgtctgtgcccacttagtggacttgtttctcgtggaggaaatcttccagactgcaaaggagaccctccaggagcttcagtgcttctgcaagtatctacagcggtggagggaagctgtcacagcccgcaagaaactgaggcgccaaatgcgggctttccctgctgcgccctgctgcgtggacgtgagcgaccggctgagggcgctggcgcccagcgcagagtgccccattgctgaagagaacctggccaggggcctcctggacctgggccatgcagggagattgggcatctcctgcaccaggttaaggcggctcagaaacaagacagctcaccagatgaaggttcagcacttctaccagcagctgctgagtgatgtggcatgggcgtctctggacctgccatccctcgtggctgagcacctccctgggaggcaggagcatgtgttttggaagctggtgctggtgttgccggatgtagaggagcagtccccagagagttgtggcagaattctagcaaattggttaaaagtcaagttcatgggagatgaaggctcagtggatgacacatccagcgatgctggtgggattcagacgctttcgcttttcaactcacttagcagcaaaggggatcagatgatttctgttaacgtgtgtataaaggtggcccatggcgccctcagtgatggtgccattgatgctgtggagacacagaaggacctcctgggagccagtgggctcatgctgctgcttccccccaaaatgaagagtgaggacatggcagaggaggacgtgtactggctgtcggccttgctgcagctcaagcagctcctgcaggctaagcccttccagcctgcgcttcctctggtggttcttgtgcctagcccaggaggggacgccgttgagaaggaagtagaagatggtctgatgctacaggacttggtttcagctaagctgatttcagattacactgttaccgagatccctgataccattaatgatctacaaggttcaactaaggttttgcaagcagtgcagtggctggtttcccactgcccccattcccttgacctctgctgccagactctcattcagtacgtcgaagacgggattggccatgagtttagtggccgctttttccatgacagaagagagaggcgtctgggcggtcttgcttctcaggagcctggcgccatcattgagctgtttaacagtgtgctgcagttcctggcttctgtggtgtcctctgaacagctgtgtgacctgtcctggcctgtcactgagtttgctgaggcagggggcagccggctgcttcctcacctgcactggaatgccccagagcacctggcctggctgaagcaggctgtgctcgggttccagcttccgcagatggaccttccacccctgggggccccctggctccccgtgtgctccatggttgtccagtacgcctcccagatccccagctcacgccagacacagcctgtcctccagtcccaggtggagaacctgctccacagaacctactgtaggtggaagagcaagagtccctccccagtccatggggcaggcccctcggtcatggagatcccatgggatgatcttatcgccttgtgtatcaaccacaagctgagagactggacgcccccccggcttcctgttacatcagaggcgctgagtgaagatggtcagatatgtgtgtatttttttaaaaacgatttgaaaaaatatgatgttcctttgtcgtgggaacaagccaggttgcagacgcagaaggagctacagctgagagagggacgtttggcaataaagccttttcatccttctgcaaacaattttcccataccattgcttcacatgcaccgtaactggaagaggagcacagagtgtgctcaagaggggaggattcccagcacagaggatctgatgcgaggagcttctgctgaggagctcttggcgcagtgtttgtcgagcagtctgctgctggagaaagaagagaacaagaggtttgaagatcagcttcagcaatggttgtctgaagactcaggagcatttacggatttaacttcccttcccctctatcttcctcagactctagtgtctctttctcacactattgaacctgtgatgaaaacatctgtaactactagcccacagagtgacatgatgagggagcaactgcagctgtcagaggcgacaggaacgtgtctaggcgaacgactaaagcacctggaaaggctgatccggagttcaagggaagaggaagttgcctctgagctccatctctctgcgctgctagacatggtggacatttga

SEQ ID NO: 155 - DNA, 3492 bp, Homo sapiens
atgaccaggaccagggcagcactcctcctgttcacagccttagcaacttctctaggtttcaacttggacacagaggagctgacagccttccgtgtggacagcgctgggtttggagacagcgtggtccagtatgccaactcctgggtggtggttggagccccccaaaagataacagctgccaaccaaacgggtggcctctaccagtgtggctacagcactggtgcctgtgagcccatcggcctgcaggtgcccccggaggccgtgaacatgtccctgggcctgtccctggcgtctaccaccagcccttcccagctgctggcctgcggccccaccgtgcaccacgagtgcgggaggaacatgtacctcaccggactctgcttcctcctgggccccacccagctcacccagaggctcccggtgtccaggcaggagtgcccaagacaggagcaggacattgtgttcctgatcgatggctcaggcagcatctcctcccgcaactttgccacgatgatgaacttcgtgagagctgtgataagccagttccagagacccagcacccagttttccctgatgcagttctccaacaaattccaaacacacttcactttcgaggaattcaggcgcagctcaaaccccctcagcctgttggcttctgttcaccagctgcaagggtttacatacacggccaccgccatccaaaatgtcgtgcaccgattgttccatgcctcatatggggcccgtagggatgccgccaaaattctcattgtcatcactgatgggaagaaagaaggcgacagcctggattataaggatgtcatccccatggctgatgcagcaggcatcatccgctatgcaattggggttggattagcttttcaaaacagaaattcttggaaagaattaaatgacattgcatcgaagccctcccaggaacacatatttaaagtggaggactttgatgctctgaaagatattcaaaaccaactgaaggagaagatctttgccattgagggtacggagaccacaagcagtagctccttcgaattggagatggcacaggagggcttcagcgctgtgttcacacctgatggccccgttctgggggctgtggggagcttcacctggtctggaggtgccttcctgtaccccccaaatatgagccctaccttcatcaacatgtctcaggagaatgtggacatgagggactcttacctgggttactccaccgagctggccctctggaaaggggtgcagagcctggtcctgggggccccccgctaccagcacaccgggaaggctgtcatcttcacccaggtgtccaggcaatggaggatgaaggccgaagtcacggggactcagatcggctcctacttcggggcctccctctgctccgtggacgtagacagcgacggcagcaccgacctggtcctcatcggggccccccattactacgagcagacccgagggggccaggtgtctgtgtgtcccttgcccagggggtggagaaggtggtggtgtgatgctgttctctacggggagcagggccacccctggggtcgctttggggcggctctgacagtgctgggggatgtgaatggggacaagctgacagacgtggtcatcggggccccaggagaggaggagaaccggggtgctgtctacctgtttcacggagtcttgggacccagcatcagcccctcccacagccagcggatcgcgggctcccagctctcctccaggctgcagtattttgggcaggcactgagcgggggtcaagacctcacccaggatggactggtggacctggctgtgggggcccggggccaggtgctcctgctcaggaccagacctgtgctctgggtgggggtgagcatgcagttcatacctgccgagatccccaggtctgcgtttgagtgtcgggagcaggtggtctctgagcagaccctggtacagtccaacatctgcctttacattgacaaacgttctaagaacctgcttgggagccgtgacctccaaagctctgtgaccttggacctggccctcgaccctggccgcctgagtccccgtgccaccttccaggaaacaaagaaccggagtctgagccgagtccgagtcctcgggctgaaggcacactgtgaaaacttcaacctgctgctcccgagctgcgtggaggactctgtgacccccattaccttgcgtctgaacttcacgctggtgggcaagcccctccttgccttcagaaacctgcggcctatgctggccgccgatgctcagagatacttcacggcctccctaccctttgagaagaactgtggagccgaccatatctgccaggacaatctcggcatctccttcagcttcccaggcttgaagtccctgctggtggggagtaacctggagctgaacgcagaagtgatggtgtggaatgacggggaagactcctacggaaccaccatcaccttctcccaccccgcaggactgtcctaccgctacgtggcagagggccagaaacaagggcagctgcgttccctgcacctgacatgtgacagcgccccagttgggagccagggcacctggagcaccagctgcagaatcaaccacctcatcttccgtggcggcgcccagatcaccttcttggctacctttgacgtctcccccaaggctgtcctgggagaccggctgcttctgacagccaatgtgagcagtgagaacaacactcccaggaccagcaagaccaccttccagctggagctcccggtgaagtatgctgtctacactgtggttagcagccacgaacaattcaccaaatacctcaacttctcagagtctgaggagaaggaaagccatgtggccatgcacagataccaggtcaataacctgggacagagggacctgcctgtcagcatcaacttctgggtgcctgtggagctgaaccaggaggctgtgtggatggatgtggaggtctcccacccccagaacccatcccttcggtgctcctcagagaaaatcgcacccccagcatctgacttcctggcgcacattcagaagaatcccgtgctggactgctccattgctggctgcctgcggttccgctgtgacgtcccctccttcagcgtccaggaggagctggatttcaccctgaagggcaacctcagctttggctgggtccgccagatattgcagaagaaggtgtcggtcgtgagtgtggctgaaattacgttcgacacatccgtgtactcccagcttccaggacaggaggcatttatgagagctcagacgacaacggtgctggagaagtacaaggtccacaaccccacccccctcatcgtaggcagctccattgggggtctgttgctgctggcactcatcacagcggtactgtacaaagttggcttcttcaagcgtcagtacaaggaaatgatggaggaggcaaatggacaaattgccccagaaaacgggacacagacccccagcccgcccagtgagaaatga

SEQ ID NO: 156 - DNA, 4071 bp, Homo sapiens
atggacctgaaggagaagcacctgggcgagcctccctcagccctgggcctgtccacgcggaaggccctcagcgtcctgaaggagcagctggaggcagtgctggaaggacatctcagggagcggaagaagtgtctgacgtggaaggaggtgtggagaagcagcttcctccaccacagtaaccgctgctcctgcttccactggccgggggcctcactcatgctactggccgtgctgctgctgctgggctgctgcgggggacagccagccgggagccgtggggtggggctggtgaatgcctcggccttgttcctgttactgcttctcaaccttgtgctcatcgggcggcaagaccggctgaagcgtcgggaggtagagcggaggctgcgagggatcattgaccaaatccaagatgccctcagggatggcagggagatccagtggcccagtgccatgtatccagacctccacatgccttttgcgccatcctggtccttgcactgggcctacagagacggacacctggtcaacctgccagtcagcctgctggttgaaggagacatcatagctttgaggcctggccaggaatcgtttgcttctctgagggggatcaaggatgacgagcacatcgtcctggagccgggagacctcttcccccccttctcccctccaccctcaccccggggagaagtggagagagggccacagagcccccagcagcaccggcttttccgtgtccttgagacccctgtgattgacaacatcagatggtgcctggacatggccctgtcccgaccagtcactgccctggacaatgagcggttcacagtgcagtcggtgatgctacactatgctgtgcccgtggtcctggccggcttcctcatcaccaatgccctgcgcttcatcttcagtgccccgggggtcacttcctggcagtacaccctcctccagctccaggtgaatggcgtcctgcccatcctccccctgctctttccagtcctctgggttctggcaactgcctgtggagaggcccgtgtcctggcccagatgagcaaggcctcacccagctccctgctggctaagttctcagaggatactctcagcagctatacggaggctgtctcctctcaggaaatgctgcgctgcatttggggccacttcctgagggtgctcggggggacatcgccaacgctgagccacagttccagcctgctgcacagcctgggctctgtcacggtcctgtgctgtgtggacaaacaggggatcctgtcatggccaaatcccagcccagagactgtactgttcttcagcgggaaggtggagccccctcacagcagccatgaggacctcaccgatggcctatccacccgctccttctgccatcccgagccccatgaacgagacgccctcctggctggctccctgaacaacaccctgcacctttccaatgagcaggagcgtggcgactggcctggcgaggctcccaagccccccgagccctattcacaccacaaagcgcatggccgcagcaaacacccatctggctccaacgtgagcttcagcagggacaccgagggtggtgaagaagagcccagcaagacccagcctgggatggagagcgacccctacgaagcagaggactttgtgtgtgactaccacctggagatgctgagcctgtcccaggaccagcagaacccctcctgcatccagtttgatgactccaactggcagctgcacctcacctccctcaaacccctgggcctcaatgtgctgctgaacctgtgtgatgccagcgtcaccgagcgcctgtgccgattctccgaccacctgtgcaacatcgccctgcaagagagccacagcgccgtgctgcccgtccatgtgccctggggcctctgcgagcttgcccgcctcattggcttcactcctggggccaaggagcttttcaagcaggagaaccatctggcgctgtaccgcctccccagtgccgagacaatgaaggagacatcgctggggcggctctcctgtgtcaccaagcggcggcctcccctcagccacatgatcagcctcttcattaaagacaccaccaccagcacagagcagatgctgtcccatggcaccgctgatgtggtcttagaggcctgcacagacttctgggacggagctgacatctaccctctctcgggatctgacagaaagaaagtgctggacttctaccagcgagcctgcctgtctgggtattgctctgccttcgcctacaagcccatgaactgcgccctgtcctctcagctcaatggcaagtgcatcgagctggtacaggtgcccggccaaagcagcatcttcaccatgtgcgagctgcccagcaccatccccatcaagcagaacgcccgccgcagcagctggagctctgacgaagggatcggggaggtgctggagaaggaagactgcatgcaggccctgagcggccagatcttcatgggcatggtgtcctcccagtaccaggcccggctggacatcgtgcgcctcattgatgggcttgtcaacgcctgcatccgctttgtctacttctctttggaggatgagctcaaaagcaaggtgtttgcagaaaaaatgggcctggagacaggctggaactgccacatctccctcacacccaatggtgacatgcctggctccgagatccccccctccagccccagccacgcaggctccctgcatgatgacctgaatcaggtgtcccgagatgatgcagaagggctcctcctcatggaggaggagggccactcggacctcatcagcttccagcctacggacagcgacatccccagcttcctggaggactccaaccgggccaagctgccccggggtatccaccaagtgcggccccacctgcagaacattgacaacgtgcccctgctagtgccccttttcaccgactgcaccccagagaccatgtgtgagatgataaagatcatgcaagagtacggggaggtgacctgctgcctgggcagctctgccaacctgcggaacagctgcctcttcctccagagcgacatcagcattgccctggatcccctgtacccatcccgttgctcctgggagacctttggctacgccaccagcatcagcatggcccaggcctcggatggcctttctcccctgcagctgtcagggcagctcaacagcctgccctgttccctgacctttcgccaggaggagaccatcagcatcatccggcttatcgaacaggctcggcatgccacctatggcatccgtaagtgcttcctcttcctgctgcagtgccagctgactcttgtggtcatccagttcctttcttgcctggtccagctgccgccactcctgagtaccaccgacatcctgtggctgtcctgcttttgctaccctctgctcagcatctctctgctggggaagcccccccatagctccatcatgtctatggcaacggggaaaaacctccagtccattcccaagaagacccagcactacttcctgctctgcttcctgctcaagttcagcctcaccatcagctcctgcctcatctgctttggcttcacactgcagagcttctgtgacagctcccgggaccgcaacctcaccaactgctcctccgtcatgctgcccagcaacgacgacagggctccagcctggtttgaggactttgccaatggactgctgtcggctcagaagctcacggccgccctgattgtcctgcacactgtcttcatttccatcacccatgtgcatcgcaccaagcccctgtggagaaagagccccttgaccaacctctggtgggccgtgacagtgcctgtggtgctgctgggtcaggtggtccagacggctgtggacctgcagctgtggacacacagggacagccacgtccactttggcctggaggacgtgcccctgctgacatggctcctgggctgcctgtccctggtccttgtggtggtgaccaatgagatcgtgaagctacatgagattcgggtccgagtccgctaccagaagcgacagaagctgcagtttgaaactaagctgggcatgaactctcccttctga

SEQ ID NO: 157 - DNA, 924 bp, Homo sapiens
atgaccgagaccaccaagacccacgttatcttgctcgcctgcggcagcttcaatcccatcaccaaagggcacattcagatgtttgaaagagccagggattatctgcacaaaactggaaggtttattgtgattggcgggattgtctcccctgtccacgactcctatggaaaacagggcctcgtgtcaagccggcaccgtctcatcatgtgtcagctggccgtccagaattctgattggatcagggtggacccttgggagtgctaccaggacacctggcagacgacctgcagcgtgttggaacaccaccgggacctcatgaagagggtgactggctgcatcctctccaatgtcaacacaccttccatgacacctgtgatcggacagccacaaaacgagaccccccagcccatttaccagaacagcaacgtggccaccaagcccactgcagccaagatcttggggaaggtgggagaaagcctcagccggatctgctgtgtccgcccgccggtggagcgtttcacctttgtagatgagaatgccaatctgggcacggtgatgcggtatgaagagattgagctacggatcctgctgctgtgtggtagtgacctgctggagtccttctgcatcccagggctctggaacgaggcagatatggaggtgattgttggtgactttgggattgtggtggtgccccgggatgcagccgacacagaccgaatcatgaatcactcctcaatactccgcaaatacaaaaacaacatcatggtggtgaaggatgacatcaaccatcccatgtctgttgtcagctcaaccaagagcaggctggccctgcagcatggggacggccatgttgtggattacctgtcccagccggtcatcgactacatcctcaaaagccagctgtacatcaatgcctccggctag

SEQ ID NO: 158 - DNA, 1028 bp, Homo sapiens
ctgggcggaagtggctgtggctttgccctttggcctttgctggctgtgtggcggctccgcggttcgcaggtcgttcgctgagcgtctctgcttagccgcggtcatgagccggcacagccggctgcagaggcaggttctgagcctgtaccgcgatctgctgcgcgccgggcgtgggaagccgggcgccgaggcgcgagtgcgggcagagttccggcagcatgcgggcctgccgcggtccgacgtgctgcgcatcgagtacctgtaccgccgcgggcggcgccagctgcagctgctacgctcgggccacgccaccgccatgggcgccttcgtacgcccgcgggccccgaccggggagcctggcggcgtgggttcccagcctgacgacggcgacagtccaaggaacccccacgacagcacgggggcaccggagacccgccccgacggacggtgacaggcgaagagccgaactcgctcgatggcgtggtggagccaggaggctcgcctgactgcatggggggactggggaacccgcctaaggtgagaggtcttaagagactagcttgacgaattggggatgtcagagactcctccttggcgacgcagggggcctagagagccccgtgatggacggcaagggaggcccgccttttccgatgcttggagacaggtcggtgctcctcccccatgagggcttggggcggcctgggacgctggcgggctggacagtgtcaagccaagagctacttgcccgaaggtacggggagccaggacgacccccggtggacagggagagcctgagacgcccttctcttgacccctgagaacatacccacttctggctcctcaaggagtctcccctctcctgtatttaactctgagaagtgcagactttttgctgagaacgttttgggaaggtgccctgatgagcggtgagaagcccggaatccccttctggaaaactttcccccattaattgtgacaagccaggaccatgaggaaggggtagggcaacaacttgatactctttg

SEQ ID NO: 159 - DNA, 2169 bp, Homo sapiens
atggagaagaatggaaataaccgaaagctgcgggtttgtgttgctacttgtaaccgtgcagattattctaaacttgccccgatcatgtttggcattaaaaccgaacctgagttctttgaacttgatgttgtggtacttggctctcacctgatagatgactatggaaatacatatcgaatgattgaacaagatgactttgacattaacaccaggctacacacaattgtgaggggagaagatgaggcagccatggtggagtcagtaggcctggccctagtgaagctgccagatgtccttaatcgcctgaagcctgatatcatgattgttcatggagacaggtttgatgccctggctctggccacatctgctgccttgatgaacatccgaatccttcacattgaaggtggggaagtcagtgggaccattgatgactctatcagacatgccataacaaaactggctcattatcatgtgtgctgcacccgcagtgcagagcagcacctgatatccatgtgtgaggaccatgatcgcatccttttggcaggctgcccttcctatgacaaacttctctcagccaagaacaaagactacatgagcatcattcgcatgtggctaggtgatgatgtaaaatctaaagattacattgttgcactacagcaccctgtgaccactgacattaagcattccataaaaatgtttgaattaacattggatgcacttatctcatttaacaagcggaccctagtcctgtttccaaatattgacgcagggagcaaagagatggttcgagtgatgcggaagaagggcattgagcatcatcccaactttcgtgcagttaaacacgtcccatttgaccagtttatacagttggttgcccatgctggctgtatgattgggaacagcagctgtggggttcgagaagttggagcttttggaacacctgtgatcaacctgggaacacgtcagattggaagagaaacaggggagaatgttcttcatgtccgggatgctgacacccaagacaaaatattgcaagcactgcaccttcagtttggtaaacagtacccttgttcaaagatatatggggatggaaatgctgttccaaggattttgaagtttctcaaatctatcgatcttcaagagccactgcaaaagaaattctgctttcctcctgtgaaggagaatatctctcaagatattgaccatattcttgaaactctaagtgccttggccgttgatcttggcgggacgaacctccgagttgcaatagtcagcatgaagggtgaaatagttaagaagtatactcagttcaatcctaaaacctatgaagagaggattaatttaatcctacagatgtgtgtggaagctgcagcagaagctgtaaaactgaactgcagaattttgggagtaggcatttccacaggtggccgtgtaaatcctcgggaaggaattgtgctgcattcaaccaaactgatccaagagtggaactctgtggaccttaggacccccctttctgacactttgcatctccctgtgtgggtagacaatgatggcaactgtgctgccctggcggaaaggaaatttggccaaggaaagggactggaaaactttgttacacttatcacaggcacaggaatcggtggtggaattatccatcagcatgaattgatccacggaagctccttctgtgctgcagaactgggccaccttgttgtgtctctggatgggcctgattgttcctgtggaagccatgggtgcattgaagcatacgcctctggaatggccttgcagagggaggcaaaaaagctccatgatgaggacctgctcttggtggaagggatgtcagtgccaaaagatgaggctgtgggtgcgctccatctcatccaagctgcgaaacttggcaatgcgaaggcccagagcatcctaagaacagctggaacagctttgggtcttggggttgtgaacatcctccataccatgaatccctcccttgtgatcctctccggagtcctggccagtcactatatccacattgtcaaagacgtcattcgccagcaggccttgtcctccgtgcaggacgtggatgtggtggtttcggatttggttgaccccgccctgctgggtgctgccagcatggttctggactacacaacacgcaggatctactag

SEQ ID NO: 160 - DNA, 1371 bp, Homo sapiens
atgaagattgaggaggtgaagagcactacgaagacgcagcgcatcgcctcccacagccacgtgaaagggctggggctggacgagagcggcttggccaagcaggcggcctcagggcttgtgggccaggagaacgcgcgagaggcatgtggcgtcatagtagaattaatcaaaagcaagaaaatggctggaagagctgtcttgttggcaggacctcctggaactggcaagacagctctggctctggctattgctcaggagctgggtagtaaggtccccttctgcccaatggtggggagtgaagtttactcaactgagatcaagaagacagaggtgctgatggagaacttccgcagggccattgggctgcgaataaaggagaccaaggaagtttatgaaggtgaagtcacagagctaactccgtgtgagacagagaatcccatgggaggatatggcaaaaccattagccatgtgatcataggactcaaaacagccaaaggaaccaaacagttgaaactggaccccagcatttttgaaagtttgcagaaagagcgagtagaagctggagatgtgatttacattgaagccaacagtggggccgtgaagaggcagggcaggtgtgatacctatgccacagaattcgaccttgaagctgaagagtatgtccccttgccaaaaggggatgtgcacaaaaagaaagaaatcatccaagatgtgaccttgcatgacttggatgtggctaatgcgcggccccaggggggacaagatatcctgtccatgatgggccagctaatgaagccaaagaagacagaaatcacagacaaacttcgaggggagattaataaggtggtgaacaagtacatcgaccagggcattgctgagctggtcccgggtgtgctgtttgttgatgaggtccacatgctggacattgagtgcttcacctacctgcaccgcgccctggagtcttctatcgctcccatcgtcatctttgcatccaaccgaggcaactgtgtcatcagaggcactgaggacatcacatcccctcacggcatccctcttgaccttctggaccgagtgatgataatccggaccatgctgtatactccacaggaaatgaaacagatcattaaaatccgtgcccagacggaaggaatcaacatcagtgaggaggcactgaaccacctgggggagattggcaccaagaccacactgaggtactcagtgcagctgctgaccccggccaacttgcttgctaaaatcaacgggaaggacagcattgagaaagagcatgtcgaagagatcagtgaacttttctatgatgccaagtcctccgccaaaatcctggctgaccagcaggataagtacatgaagtga

SEQ ID NO: 161 - DNA, 5616 bp, Homo sapiens
atggcaaacctggaagaaagcttcccccgaggaggtacaagaaagatccacaaaccagagaaagctttccagcagtcagttgaacaagacaacttatttgatatttctactgaagagggatccaccaaaagaaaaaagagccagaaggggccagcaaaaacaaaaaagttgaaaatcgaaaagagagaaagcagcaagtccgcaagagagaagtttgaaatccttagtgttgagtccctgtgtgagggaatgcgtattttgggttgcgtgaaagaggtgaatgaactggaactggtgattagtctccccaatggcctccagggctttgtgcaagtcactgaaatctgtgatgcctacaccaaaaagctgaatgagcaggtgacacaagaacaacctctgaaggacctacttcacttgcctgaacttttctcacctggaatgctggtaagatgtgtggtgagcagtctgggcatcacagacaggggcaagaagagtgtcaagctgtctctgaaccccaaaaatgtcaacagagtgctgagtgctgaggccctgaagcctggcatgctacttacaggtaccgtatccagcctggaagaccatggctacctagtggacattggtgttgatgggaccagagcttttctgccactgctgaaagcccaggagtacatcagacagaagaacaaaggtgctaaactaaaggtgggtcagtacctgaactgcattgttgaaaaggtgaaaggcaacggaggagttgttagtctgtctgttggtcactcagaggtttctacggccattgctactgaacagcagagctggaaccttaataacttgctaccaggactggtggtcaaagctcaggtacagaaggtgactccatttggccttacgctaaacttcctcacattcttcacgggcgtggttgactttatgcacctggatcccaagaaagctggaacatatttctcaaatcaggcagtgagggcctgcatcctttgcgtccatcctcgaaccagagttgtgcacctgagcctgcgccccatcttcctacagcctggacgcccactcacccgactctcttgccagaaccttggagcagtgctggatgatgttcctgtccagggttttttcaaaaaggctggggccacctttaggctgaaggatggggttctggcctatgcccggctcagccatctctctgattctaagaacgtcttcaatcctgaggccttcaagccagggaacactcacaagtgtagaattattgactacagccaaatggatgaactggccttgctctctctacgaacgtctattattgaagctcagtaccttagatatcatgacatcgaacctggggcagtggtaaagggcacagtgctaaccataaagtcatatgggatgctggtgaaggtgggcgagcagatgaggggcctggtacctcccatgcacctggctgacatcctgatgaagaatccggagaagaagtaccacatcggggatgaggtcaagtgccgggttttgctttgtgaccctgaagccaagaagctgatgatgaccctgaaaaaaaccctgattgagtccaaactacctgtcattacctgctatgccgatgccaagcctggtctgcagacacatggcttcatcatcagggtcaaggactatggctgcattgtgaagttctacaacaatgtgcagggactggtgcccaagcatgagctcagtactgagtatatccctgacccggagagagttttttacactggccaggtggtgaaggttgtcgtattgaactgtgagccatccaaagagaggatgctcttatccttcaagctgtcgagtgatccagagccaaagaaagagcctgcaggacacagtcagaagaaaggaaaagccattaacattgggcagttggtagatgtgaaggttttagagaagaccaaagatgggctggaggtggctgtcctgccccacaacatccgtgctttcctccccacatctcatctgtcggaccacgttgccaacggcccattgttacatcattggctccaggcaggtgacatccttcaccgagtcctgtgtctgagccagagcgaggggcgtgttcttctttgcaggaagccagccttggtctccacagtagaaggtggccaggatcccaagaacttctcagaaatccatcctggaatgctgctcattggttttgtgaagagcatcaaggactatggcgtgttcatccagttcccctcaggtcttagcggactggccccaaaagctatcatgagtgacaaatttgtgacctccacaagtgaccactttgttgagggccagacagtagcggcaaaggtgaccaatgtggatgaggagaagcagcggatgctgctgtcactgcggctgtcggactgtggtctgggggacttggctatcaccagcctcctcctcctgaatcagtgcctggaggagctgcagggcgtgcgcagccttatgagcaaccgagactctgtgttgatccagacgctggccgagatgaccccaggaatgttccttgacctagtggtgcaggaggtgttggaagatggctctgtggtattcagtgggggtccagtgcccgacctggtcctgaaagccagcagataccatcgcgcagggcaggaggtggaatctgggcagaaaaagaaggttgttatcttaaatgttgatcttttgaagttggaagtgcacgtttcccttcaccaggacttggtgaatagaaaagctagaaagctgaggaaaggcagcgaacaccaggcgattgtgcagcacttggagaagtcctttgccattgcctccttggtagagacgggccacctggcagctttctccctgacctctcacctcaacgacaccttccgctttgactcagagaaattgcaggtgggacagggtgtctccctaaccctcaagaccacagaaccaggagtgactggccttcttttggctgtggaggggccggctgccaagaggaccatgaggccgacccagaaggactctgagacagttgatgaggatgaagaagtggatccagctctgactgtagggaccataaagaagcacaccctctccatcggggacatggtcacagggactgtcaagtccattaagcctacccatgtggttgtgactctggaagatggcattattggctgtatccatgcctcccacattctagatgatgttccagagggcacctctcctactaccaagctgaaggttgggaagacggtcactgcccgagtgattggcgggcgagacatgaagacattcaagtatctcccaataagtcaccccagattcgttcgaaccatcccggagctgagtgttcggccaagtgagctggaggatggccacactgctcttaacactcactctgttagccccatggagaagattaaacagtaccaggccggccagactgttacttgcttcttaaagaaatacaatgtggtgaagaaatggcttgaggtggagattgccccagacatccgggggagaattcccttattgctcacttctctgagcttcaaggttctgaagcatccagataagaagttccgggttggccaggccctgagggccaccgttgttggcccagattcctccaagaccctcttatgtctgtccctcacaggtcctcacaagcttgaggaaggggaagtggccatgggccgagtggtgaaggtgactcccaacgaggggctgaccgtctccttcccctttgggaagataggaacagtcagtatatttcacatgagtgactcctactccgagacgcccctggaagacttcgtcccccagaaggttgtcagatgttacatcctgtccactgcagacaacgtattgactttgtcgctgcgatcatccagaacaaacccggagacgaaaagcaaagtagaagatccagagattaactccatccaggacattaaggaagggcagcttctgaggggctatgtagggtccatccagccacacggtgtgttctttcgccttggcccctccgttgtgggtttggctcggtactcccatgtctcccagcacagcccgtccaagaaagccctttataacaaacacctccctgaagggaagctgctcacagccagggtcctacgccttaaccaccagaagaacctggtagagctgtctttcctccccggagacactgggaagccagacgtgctttctgcttccttggaagggcaacttacaaagcaagaggagaggaaaacagaggctgaggagagagaccaaaaaggggaaaagaaaaatcagaaaaggaacgagaagaagaaccagaaggggcaggaggaggtggagatgcccagcaaggagaagcaacagccccagaagccacaggcgcagaagcggggcgggcgggagtgccgggagtctgggagtgagcaggaaagagtgagcaagaagccaaagaaagccggcctgtcagaggaggacgacagccttgtggacgtgtactatcgggagggaaaagaggaggcagaagagacgaatgtgctgcccaaggagaagcaaaccaagccagcagaagcgccccggctgcagctgtcttcaggcttcgcttggaatgtgggactagactctctgaccccggccttgccacctctagcagagagctcagacagcgaggaggatgagaagccacaccaagccacgataaagaaaagcaagaaagaaagggagttggagaagcagaaggcagagaaggaactgtcccgcattgaggaggcgctgatggatcctgggcggcagccagagtccgcggatgattttgaccgactggtgctgagctcccccaacagctccattctgtggctgcagtacatggctttccacctgcaggccacggagatcgagaaggcccgtgccgtggctgagagggcccttaagaccatctccttcagagaggagcaggagaagctgaacgtgtgggtggctctgctgaacctggagaacatgtacggctctcaggagtccctgaccaaggtctttgagcgagccgtgcagtacaacgagcctctcaaagtctttctccacctggctgacatctacgccaagtcagagaaattccaggaagctggtgaactctacaaccggatgctgaagcgtttccggcaggagaaagctgtgtggatcaaatacggcgccttccttctgcggaggagccaggctgcagccagtcaccgcgtgctgcagcgagccctggagtgcctgcctagcaaggagcatgtggatgtcattgccaagtttgcccagcttgagtttcagctgggggatgcagagcgggccaaagccatttttgagaacacgctgagcacctacccaaagcgcacagatgtctggtcggtctatatcgacatgaccatcaagcacggcagccagaaggacgtccgggacatctttgagcgggtcattcatctgagcttggcccccaagagaatgaagttcttcttcaagcgctacctggactacgagaagcagcatggcactgagaaggatgtgcaggcagtcaaggccaaggccctggagtatgtggaggccaagagctcagtgctagaggactag

SEQ ID NO: 162 - DNA, 300 bp, Homo sapiens
atgggacaagaagtaacaatgagatgtcagccaattttaggccacaatactgttttctggtacagacagaccatgaagcaaggactggagttgctggcttacttccgcaaccgggctcctctagatgattcggggatgccgaaggatcgattctcagcagagatgcctgatgcaactttagccactctgaagatccagccctcagaacccagggactcagctgtgtatttttgtgctagtgccctcaacagggtcgatgagcagttcttcgggccagggacacggctcaccgtgctagag

SEQ ID NO: 163 - DNA, 681 bp, Homo sapiens
  misc_feature (637)..(637): n is a, c, g, or t
ttttttttttttttttttaattgtgatatttgctttattataatggtccggaacagaacctggaatatctccaaactataccattgtgcttaaggcaatagtatttttggacaaacttcgctgaacatctttacatttattttactctctgatgttgttttcattaaggatgacatgtgaatgaagcaccacagtccttaagtgtgtagggcttctaaatatcttaatcttgtcccttggggaggagtgagggctacgaagtaaggtcacagtcttcccctagatgttgacagctcttatgtactcaggatgtcaattttcacagtgcacacttcttattgtcactccatagatactcctggcagctgtgtgtgtctatgtgtgtgggttttctttgctgatgtggtctgaaggccatttctgagctctaccagtccagtccaatttatgtgattctcacctgtcataatgttgggtttcttcaacattagtggtaggttttcctcgtctgctctggttgcaatatttactctcaaagcggagggcttcccaggttcctaatcacctctgagctatggatacagccaatccagatggtccaggttaaaacaagtcttggatcaagagtatcattcanaggattttaacccatgtcagagctttcctcgtgccgaattcttg

SEQ ID NO: 164 - DNA, 2543 bp, Homo sapiens
cggacccgaggagcaggaagcggcggctccttcggccacccaggcagcagccacagcggggagtgcgcggcgcggggacaggaagagaggggcaatggctgccgaccccaccgagctgcggctgggcagcctccccgtcttcacccgcgacgacttcgagggcgactggcgcctagtggccagcggcggcttcagccaggtgttccaggcgcggcacaggcgctggcggacggagtacgccatcaagtgcgccccctgccttccacccgacgccgccagctctgatgtgaattacctcattgaagaagctgccaaaatgaagaagatcaagtttcagcacatcgtgtctatctacggggtgtgcaagcagcccctgggtattgtgatggagtttatggccaacggctccctggagaaggtgctgtccacccacagcctctgctggaagctcaggttccgcatcatccatgagaccagcttggccatgaacttcctgcacagcattaagccgcctctgctccacctggacctcaagccgggcaacatactcctggacagcaacatgcatgtcaaaatttcagacttcggcctgtccaagtggatggaacagtccacccggatgcagtacatcgagaggtcggctctgcggggcatgctcagctacatcccccctgagatgttcctggagagtaacaaggccccaggacctaaatatgatgtgtacagctttgcaattgtcatctgggagctactcactcagaagaaaccatactcagggttcaacatgatgatgattattatccgagtggcggcaggcatgcggccctccctacagcctgtctctgaccaatggccaagcgaggcccagcagatggtggacctgatgaaacgctgctgggaccaggaccccaagaagaggccatgctttctagacattaccatcgagacagacatactgctgtcactgctgcagagtcgtgtggcagtcccagagagcaaggccctggccaggaaggtgtcctgcaagctgtcgctgcgccagcccggggaggttaatgaggacatcagccaggaactgatggacagtgactcaggaaactacctgaagcgggcccttcagctctccgaccgtaagaatttggtcccgagagatgaggaactgtgtatctatgagaacaaggtcacccccctccacttcctggtggcccagggcagtgtggagcaggtgaggttgctgctggcccacgaggtagacgtggactgccagacggcctctggatacacgcccctcctgatcgccgcccaggaccagcaacccgacctctgtgccctgcttttggcacatggtgctgatgccaaccgagtggatgaggatggctgggccccactgcactttgcagcccagaatggggatgacggcactgcgcgcctgctcctggaccacggggcctgtgtggatgcccaggaacgtgaagggtggacccctcttcacctggctgcacagaataactttgagaatgtggcacggcttctggtctcccgtcaggctgaccccaacctgcatgaggctgagggcaagacccccctccatgtggccgcctactttggccatgttagcctggtcaagctgctgaccagccagggggctgagttggatgctcagcagagaaacctgagaacaccactgcacctggcagtagagcggggcaaagtgagggccatccaacacctgctgaagagtggagcggtccctgatgcccttgaccagagcggctacggcccactgcacactgcagctgccaggggcaaatacctgatctgcaagatgctgctcaggtacggagccagccttgagctgcccacccaccagggctggacacccctgcatctagcagcctacaagggccacctggagatcatccatctgctggcagagagccacgcaaacatgggtgctcttggagctgtgaactggactcccctgcacctagctgcacgccacggggaggaggcggtggtgtcagcactgctgcagtgtggggctgaccccaatgctgcagagcagtcaggctggacacccctccacctggcggtccagaggagcaccttcctgagtgtcatcaacctcctagaacatcacgcaaatgtccacgcccgcaacaaggtgggctggacacccgcccacctggccgccctcaagggcaacacagccatcctcaaagtgctggtcgaggcaggcgcccagctggacgtccaggatggagtgagctgcacacccctgcaactggccctccgcagccgaaagcagggcatcatgtccttcctagagggcaaggagccgtcagtggccactctgggtggttctaagccaggagccgagatggaaatttagacaacttggccagccgtggtggctcacgtctgtaatcccagcactttgggaggctgaggcaggcagatcacctgatatcaagagtttgaggccagcctggccaacatggcaaaaccctgtctctgctaaaaatacaaaatttagctgggta

SEQ ID NO: 165 - DNA, 1653 bp, Homo sapiens
atgacaggtgacaagggtccccaaaggctaagcgggtccagctatggttccatctccagcccgaccagcccgaccagcccagggccacagcaagcacctcccagagagacctacctgagtgagaagatccccatcccagacacaaaaccgggcaccttcagcctgcggaagctatgggccttcacggggcctggcttcctcatgagcattgctttcctggacccaggaaacatcgagtcagatcttcaggctggcgccgtggcgggattcaaacttctctgggtgctgctctgggccaccgtgttgggcttgctctgccagcgactggctgcacgtctgggcgtggtgacaggcaaggacttgggcgaggtctgccatctctactaccctaaggtgccccgcaccgtcctctggctgaccatcgagctagccattgtgggctccgacatgcaggaagtcatcggcacggccattgcattcaatctgctctcagctggacgaatcccactctggggtggcgtcctcatcaccatcgtggacaccttcttcttcctcttcctcgataactacgggctgcggaagctggaagctttttttggactccttataaccattatggccttgacctttggctatgagtatgtggtggcgcgtcctgagcagggagcgcttcttcggggcctgttcctgccctcgtgcccgggctgcggccaccccgagctgctgcaggcggtgggcattgttggcgccatcatcatgccccacaacatctacctgcactcggccctggtcaagtctcgagagatagaccgggcccgccgagcagacatcagagaagccaacatgtacttcctgattgaggccaccatcgccctgtccgtctcctttatcatcaacctctttgtcatggctgtctttgggcaggccttctaccagaaaaccaaccaggctgcgttcaacatctgtgccaacagcagcctccacgactacgccaagatcttccccatgaacaacgccaccgtggccgtggacatttaccaggggggcgtgatcctgggctgcctgttcggccccgcggccctctacatctgggccataggtctcctggcggctgggcagagctccaccatgacgggcacctacgcgggacagttcgtgatggagggcttcctgaggctgcggtggtcacgcttcgcccgtgtcctcctcacccgctcctgcgccatcctgcccaccgtgctcgtggctgtcttccgggacctgagggacttgtcgggcctcaatgatctgctcaacgtgctgcagagcctgctgctcccgttcgccgtgctgcccatcctcacgttcaccagcatgcccaccctcatgcaggagtttgccaatggcctgctgaacaaggtcgtcacctcttccatcatggtgctagtctgcgccatcaacctctacttcgtggtcagctatctgcccagcctgccccaccctgcctacttcggccttgcagccttgctggccgcagcctacctgggcctcagcacctacctggtctggacctgttgccttgcccacggagccacctttctggcccacagctcccaccaccacttcctgtatgggctccttgaagaggaccagaaaggggagacctctggctag

SEQ ID NO: 166 - DNA, 3348 bp, Homo sapiens
atgaggaaattcaacatcaggaaggtgctggacggcctgaccgccggctcgtcctcggcgtcgcagcagcaacagcagcagcatccgcctgggaaccgggagccggagatccaggaaacgctccagtccgagcactttcagctctgcaagactgttcgccatggatttccctatcaaccctcagccctggcctttgatcctgtacagaagatcctggcagtgggaactcagactggtgctttaaggctctttggtcgtccaggagtagaatgttattgccagcatgacagtggagctgcagtaatccagctccagttcctgattaatgagggagcgcttgtgagtgccttggctgatgacaccttacacttatggaatttacgtcagaagaggcctgccatactacattcgcttaaattttgcagagaaagggttacattttgccatctgcctttccagagtaagtggctctatgtgggcactgaacgaggtaatatacatattgtcaatgtggagtccttcacactctcaggctacgtcattatgtggaataaagccattgaactgtcatctaaatctcacccaggacctgtggtccatataagtgataatccaatggacgagggaaagcttttgattggctttgaatctggaacagtagttttatgggacctcaaatcaaagaaagccgactacagatacacatatgatgaggctatccactctgttgcttggcatcatgaaggaaaacaatttatttgcagtcattcagatggcaccttgactatatggaatgtaaggtcccctgctaaaccagtacagacaatcactccacatggaaaacagttaaaggatgggaagaagccagaaccatgcaaacctatcctcaaggtggaattcaaaacgactagatctggggagccttttattattttatcaggaggtttgtcatatgatactgtaggaagaagaccttgcttaacagtgatgcatgggaaaagcactgctgtgctagaaatggactattcaattgttgattttctaacgctgtgtgaaacaccatacccaaatgattttcaagaaccatatgctgtggttgttcttctagaaaaggatttagtacttatagaccttgcacaaaatggatatcctatatttgaaaatccctaccctttgagtatacatgagtcccctgttacatgttgcgaatattttgcggattgtcctgtggaccttattcctgcactttattctgttggagctagacagaaacgtcaaggttacagcaaaaaggaatggcccatcaacggaggtaattggggcttgggtgctcaaagttacccagaaataattattacagggcatgctgatgggtcagttaagttctgggatgcttctgcaataactctacaagtattatataagctaaagacatctaaagtatttgaaaagtcaagaaataaagatgacaggccaaacacagacattgtagatgaagatccatatgccattcagatcatctcctggtgtccagaaagtagaatgctgtgcatcgctggagtttcagctcatgtcattatttatagattcagcaagcaggaagtaatcacagaagtcattccgatgcttgaagttcgattattatatgagataaatgatgtggaaactccggagggtgagcagccaccacctttgccaacacccgtgggagggtccaaccctcagcccatccctcctcagtctcatccatctaccagtagcagttcatctgatgggcttcgtgataatgtaccttgtttaaaagttaaaaactcaccacttaaacagtctccaggttatcaaacagaactagttattcagttggtttgggtgggtggagaaccaccacaacaaataaccagcctggcagtcaattcttcctatggactggtggtttttggcaattgcaatggcattgctatggttgactacctccagaaagcagtgctgctcaacctgggcactattgaattatatggctctaatgatccttatcggagagaaccccgatctcctcgtaaatctcgacagccttcaggagccggtctgtgtgatattagtgaagggactgttgttccagaggatcgctgcaaatctccaacctctgcaaagatgtcaaggaagttaagcttacctactgacctaaagcctgatttagatgtaaaggataactcctttagccgatcacggagttcaagtgtaacaagcattgacaaagaatcccgagaagcgatctccgctcttcatttctgtgaaacgtttactcgaaagacggactcgtccccttccccttgtctatgggttggaacaacgctaggaacagtgcttgtcattgcactgaaccttcccccagggggagagcaaagacttcttcagccagtaattgtgtctccaagtggtactatattgaggttaaaaggtgcaatcttgagaatggcatttctggataccacaggctgcttaataccacctgcgtatgaaccctggagagagcacaatgttcctgaagaaaaagacgaaaaggagaaattgaaaaaacggcggcctgtctcagtatccccctcctcttctcaggaaattagtgaaaaccagtatgcagtgatatgttctgaaaagcaagcaaaagtaatctcactgccaacccagaactgtgcttataagcaaaatattacagagacctcgtttgtgcttcgtggagatattgtagcattgagtaacagtatctgccttgcctgtttctgtgccaatggacatataatgacttttagtttgccaagtttaagacctctgttggatgtgtattacttgccccttaccaatatgcggatagccagaacgttctgctttaccaacaatggacaagcattataccttgtttcacctacagaaatccagagacttacttatagtcaagagacctgtgaaaatcttcaggaaatgttgggtgaactcttcactcctgtagaaacacctgaagcaccaaacaggggattctttaaaggcttatttggaggtggtgcacaatctcttgacagagaagaactatttggagaatcgtcctcaggaaaggcttcaaggagccttgcacagcatattcctggccctggtggcattgaaggcgtaaaaggggcagcatctggagttgttggtgaattagcacgagccaggctggcactagatgaaagagggcagaaacttggcgatctggaagaaagaactgcggccatgttatcaagtgcagagtcattttctaaacatgctcatgagattatgttgaaatacaaagataagaagtggtaccagttctga

SEQ ID NO: 167 - DNA, 2523 bp, Homo sapiens
atggctggaccgggcagcacgggggggcagatcggggctgcggccctggcaggcggcgcgcggtccaaggtagccccgagcgtggacttcgaccatagctgctcggacagtgtcgagtacctgacgctcaacttcgggcccttcgaaacagtgcatcgctggcggcgcctcccgccctgcgacgagttcgtgggtgcccggcgcagcaagcacacagtggtggcctataaagatgccatttatgtatttggtggagacaatgggaagaccatgctcaatgacctcctgcggttcgatgtgaaagactgctcctggtgcagggcctttaccactgggaccccaccggccccccgttaccaccactcggccgtcgtctatgggagcagcatgtttgtctttgggggttacactggggacatttattccaattctaacttgaagaataaaaacgacctctttgaatacaagtttgcaactggccagtggacggagtggaaaattgaaggacggttgccagtcgctaggtcagcccatggggccacggtgtacagtgacaagctgtggatctttgctggctatgacggcaacgccaggttgaatgacatgtggacaattggcctccaggaccgagagctcacctgctgggaggaggtggcccagagtggcgagatccccccatcttgctgcaacttccccgtggctgtgtgccgggacaagatgtttgtattctctgggcaaagcggagccaaaataaccaacaacctcttccagtttgaattcaaggacaagacgtggacacgcatcccaactgaacacctgctccggggctccccaccacccccgcagcggcgctacgggcataccatggtggcctttgaccgccacctctatgtgtttgggggtgcggccgacaacacgctgcccaacgagctgcactgctatgacgtggacttccagacctgggaggtcgtccagcccagctccgacagcgaggttggtggggctgaagtgcccgagcgagcctgtgcttccgaggaggtgcccaccctgacctatgaggagcgggttggcttcaagaagtcccgagatgtgtttggcctggactttggcaccacctcagccaagcagcccacccagcctgcctcggagctgcccagtgggaggctcttccacgcggctgctgtcatctcggacgccatgtacatcttcgggggcacggtggacaacaacatccgcagcggggagatgtacaggttccagttctcctgttaccctaaatgcacgctgcacgaggactacgggcggctgtgggagagccgccagttctgcgacgtggagttcgtgctgggtgagaaggaggagtgcgtgcagggccacgtagccattgtcacagcgcggagccgctggcttcgcaggaagatcacgcaggcgcgggagaggctggcccagaagctggagcaggaggccgccccagttcccagggaggcccccggcgtggctgctggtggggcccggccgcccctgctgcacgtggccatccgggaggccgaggcccggcccttcgaggtgctcatgcagttcctctacaccgacaagatcaaatacccacggaaaggccatgtggaggatgtgctgctcatcatggatgtgtacaaactggcactgagcttccagttgtgccgcctggagcagctgtgccgccagtacatcgaggcctccgtggacctgcagaacgtgctggttgtgtgcgagagtgccgcccggctgcagctgagccaactcaaggagcactgcctgaacttcgtggtaaaggagtcccacttcaaccaggtgatcatgatgaaggagttcgagcgcctctcctctccactgatagtggagattgtgcggcggaagcagcagccgccccctcgcactcccttggaccagccagtggacattggcacatctctgatccaggacatgaaggcatacctggagggagcgggcgcggaattctgtgacatcactctgttgcttgacgggcacccacggccagcccacaaggctatcctggccgcccgctccagctactttgaagccatgttccggtccttcatgcccgaagatgggcaggtgaacatctccatcggggagatggtgcccagcaggcaggccttcgagtccatgctgcgctacatctactacggcgaggtcaacatgccgcccgaggactcgctctacttgtttgcggccccctactactacggcttctacaacaaccggctgcaggcgtactgcaagcagaacctggagatgaacgtgacggtgcagaacgtgctgcagatcctggaggcagctgacaaaacgcaggcactggacatgaagcggcactgcctgcacatcattgtgcaccagttcaccaaggtctccaagttgcccaccctgcggtcgctgagccagcagctgctgctggacatcatagactccctggcctcccacatctcagacaagcagtgcgcagagctgggcgccgacatctga

SEQ ID NO: 168 - DNA, 1764 bp, Homo sapiens
atgcaccctttacagtgtgtcctccaagtgcagaggtctctggggtggggaccattggcctctgtgtcttggctgtcgctgaggatgtgcagggcacacagcagtctctctagtaccatgtgtcccagtccagagaggcaggaggatggagctcggaaggatttcagctccaggctggctgctggaccgacttttcaacattttttaaaaagtgcctcagctcctcaggagaagctgtcttcagaagtggaagacccacctccctatctcatgatggatgaacttcttggaaggcagagaaaagtctacctcgagacctatggctgccagatgaatgtgaatgacacagagatagcctggtccatcttacagaagagtggctacctgcggaccagtaacctccaagaggcagatgtgattctccttgtcacatgctctatcagggagaaggctgagcagaccatctggaaccgtttacatcagcttaaagccttgaagacaaggcggccccgctcccgggttcctctgaggattggaattctaggctgcatggctgagaggttgaaggaggagattctcaacagagagaaaatggtagatattttggctggtcctgatgcctaccgggaccttccccggctgctggctgttgctgagtcgggccagcaagctgccaacgtgctgctctctctggacgagacctatgctgatgtcatgccagtccagacaagcgccagtgccacgtctgcctttgtgtcaatcatgcgaggctgtgacaacatgtgtagctactgcattgttcctttcacccggggcagggagaggagtcggcctattgcctccattctagaggaagtgaagaagctttctgagcaggggctgaaagaagtgacacttcttggtcagaatgttaatagttttcgggacaattcggaggtccagttcaacagtgcagtgcctaccaatctcagtcgtggctttaccaccaactataaaaccaagcaaggaggacttcgttttgctcatcttctggatcaggtctccagagtagatcctgaaatgaggatccgttttacctctccccaccccaaggattttcctgatgaggttctgcagctgattcatgagagagataacatctgtaaacagatccacctgccagcccagagtggaagcagccgtgtgttggaggccatgcggaggggatattcaagagaagcttatgtggagttagttcaccatattagagaatctattccaggtgtgagcctcagcagcgatttcattgctggcttttgtggtgagacggaggaagatcacgtccagacagtctctttgctccgggaagttcagtacaacatgggcttcctctttgcctacagcatgagacagaagacacgggcatatcataggctgaaggatgatgtcccggaagaggtaaaattaaggcgtttggaggaactcatcactatcttccgagaagaagcaacaaaagccaatcagacctctgtgggctgtacccagttggtgctagtggaagggctcagtaaacgctctgccactgacctgtgtggcaggaatgatggaaaccttaaggtgatcttccctgatgcagagatggaggatgtcaataaccctgggctcagggtcagagcccagcctggggactatgtgctggtgaagatcacctcagccagttctcagacacttaggggacatgttctctgcaggaccactctgagggactcttctgcatattgctga

SEQ ID NO: 169 - DNA, 4186 bp, Homo sapiens
acactcttcacacgttttctgagtgtgagctttattaaatctttagcattaagatactattctactttactgagtttaaaactatttttctgaaatcattgtaatgataaggaaatgttgcgatcaaataagatttagacacacttttttttccaataggtaatttgtgaaagaagcaaaaataaatctgtggaactgaaggagcggatcagagagtatttaaagggccactactacgtgcccctcctgagagcggaagagacttcttctccagtcatcggggagctgtggtccccagaccagacggctgaggcctctcacgtcagccgctatggaggcagccccagagacccggtactgaccctgagagccttcgcagggcccctgagtccagccaaggcagaagattttcgcaagctctggaaaactccacctcgagagaaagcaggcttccttcaccacgtcaagaagtcggacccggaaagaggctttgagagagtgggaaggtactgaaaggctgagccgcagcagcgtggggcacacagttggttgcattttgattaatgacagaaggtcaaatcacagcttcaaagtaccaatttccagaaggcttttctgggagacttggtccttttcgtgaaggtctaattccttgtggatgttgtggaattctagcttaagccagtcccgtcccagacctgggggatgtctgcagtgccttcctttccttttctaattggaattccttgttggttctgggacatgtttctaaggaaccttaatattttatagaaggtaccatataatgctatggattccttgggaaaaaataggccatagccacaaagctaaattatgctgtaatcaaataaagcttcgtggaattgtttagaatattttctcaaaatatgtgcccagtgtcaggtgtacaactggaacccagaaaggacctccaggctttcgtgtgcctggccatgactagaaccacgggcaagttcacagggctgttccgtgatcatgaacacgtccgtctgtgggagttgaactgtgtgacctgggttgctggcgtgagggtctgtcgggctgaggcctccttcctgcctgcagccggttcacggctcctgagagctgtgccgggtcctgcttacctgtgaggaggcgtgctgtttcagaaaatgcaccgtatgatttcagctgccagttaaggataaaggaaaattataaccatgattgcagacattgctttggtacttgaagctttagtggcttttttctgtgtagttctgagtattttttctggtttcacagctggttaattgtgttttgtttcttacagggagctagctcatgagctggggtatccctgggttgaatactgggaatttctgggctgttttgttgatctgtcttcccaggaaggcctgcaaagactagaagaatatctcacacagcaggaaataggcaaaaaggctcaacaagaaacaggagaacgggaagcctcctgccgagataaagccaccacgtctggcagcaattccatttccgtgagggcgtttctagatgaagatgacatgagcttggaagaaataaaaaatcggcaaaatgcagctcgaaataacagcccgcccacagtcggtgcttttggacatacgaggtgcagcgccttccccttggagcaggaggcagacctcatagaagccgccgagccgggaggtccacacagcagcagaaatgggctctgccatcctctgaatcacagcaggaccctggcgggcaagagaccaaaggccccccgtggggaggaagcccatctgccacctgtctcggatttgactgttgagtttgataaactgaatttgcaaaatataggacgtagcgtttccaagacaccagatgaaagtacaaaaactaaagatcagatcctgacttcaagaatcaatgcagtagaaagagacttgttagagccttctcccgcagaccaactcgggaatggccacaggaggacagaaagtgaaatgtcagccaggatcgctaaaatgtccttgagtcccagcagccccaggcacgaggatcagctcgaggtcaccagggaaccggccaggcggctcttcctttttggagaggagccatcaaaactcgatcaggatgttttggccgctcttgaatgtgcagacgtcgacccccatcagttcccggccgtgcacagatggaagagtgctgtcctgtgctactcaccctcggacagacagagttggcccagtcccgcggtgaaaggaaggttcaagtctcagctgccagatctcagtggccctcacagctacagtccggggagaaacagcgtggctggaagcaaccccgcaaagccaggcctgggcagtcctgggcgctacagccccgtgcacgggagccagctccgcaggatggcgcgcctggctgagcttgccgccctgtaggcttggcgctgggctctcggtttgttcttcatttttaaagaaggaagggtcatatgtttattgctaaactgtcaaaaaggaatatattctgattaaattattactcctcactttgagggtgtgagaattttagaagatttaaatgttctatataacacttagatttctgatattttggaagaagttagaagttaatgaaagcaaactcagttaccaattttctggaaaatatccatgtggtaatggtagactttttaggtggcaatttctaggtctgaaatatagcagaggaaagggcgctgaggcagttgcaggcaggcagccctgtacttaccctgtactcacctcatccgacagacgctgtggatgaggaggggcttggcggaggcgtgagcaccgatgtccctttgataacctgcactcaccaagatgaactatttgccgccctgtcttttcctgggttggggggtggcatctgatggtggcagagtgcctgttggttcgcccgtgggtctcatggttcagacagagggaggtggacggcagggatcagggagccaggagcgcgcctcagacttgcagcaaccattgtgatttgggttgttcggaatatttaaattactgatcagaagatgaaagtagcttttctcttgggaagtcttgcagcccgtgggagtgataccaggagcaacacagagctcagcagcggcgccaaggtgttccctgtttcctcagcacgtgagccttcaccgcctgcttcattcaggagccagtgcagcagtaatacagtctatacattgttctgttttcaaatttatcctgaggctttgttgagcataaatgattatacgataaaggtatccgttattttggaactcatttcagttgggatctcctgtatgcagagtgttgcatttagaggtttgagtcccatcttggtttcttgccgtgctgactgtagccttcaccttgacttgaatgaaggtctgtggttggaatgtgtgaggagccgctgaggtgttcaggaggtgctgcctggaggtcggtttcttcctgggtgttacgggcaactgctcacacagttgtttctctgtgaacatttccagtgtttaatccaaaatgaaaacccaccaatgcttttgctaacttcagtgccttttataaatcatttttaaatttcctgaacttgctttttgaggatatacagggatattaagtagacgcaggattgtttttgtttgtaaaaattctgaattgaaactttgttttaaaaaaaggcttctttctttcatatgacaagagataggtcaggaatattggaatcaagatttaaatgttaaaattcgattttgttacacagggtgtgttcatttgttttgtagcagacaagatctagatcccagacagaaacaacacatgctattctaaaaagccgcattttaaaaggcaccttggttctcaaaagaaatcagaatatggatattcgtagtgatgatctgttttctctaaaatcttaccatattgtctgtatatggttgtaaattcaaatggaaagtaaaacgttttggccctgattttgtatgtggaccactgctcctgatttcccaggtcttaggccacctttgactgtttctccgtttgtttgtgggcagcgattccagtcccaacggaggcattctcgtgtgtcccggggggttatgtccttcacaaaacacttaatgaaatgaattact

SEQ ID NO: 170 - DNA, 434 bp, Homo sapiens
ttttttttttttttttttattgtttaaaaattattttatttaatggtaagtttacataacttaattttcagttatggctatttttaacaattagactgcaaaaactaggctctcatgaggcactgcaagcctgcataggcacacgactatttatgacccagatattacacgtctaggtatatatccacagaaataggtacatgtgctctcaaaagacgtgcacaacaatttttattgcagcattttccattatggtcaaatagtagaaagactctagaggcccattagtggtagaatggaaaaataaattgttacattttcatagcacagaatatgagtcagcaataaaattgaacaaatgactgcttcagcacactcaaggaacagaatattgagccaggtaccaaagagtatgtactgtccgattccattta

SEQ ID NO: 171 - DNA, 2373 bp, Homo sapiens
atggaagagaagaggcgaaaatactccatcagcagtgacaactctgacaccactgacagtcatgcgacatctacatccgcatcaagatgctccaaactgcccagcagcaccaagtcgggctggccccgacagaacgaaaagaagccctccgaggttttccggacagacttgatcacagccatgaagatcccggactcataccagctcagcccggatgactactacatcctggcagacccatggcgacaggaatgggagaaaggtgtgcaggtgcctgccggggcagaggccatcccagagcccgtggtgaggatcctcccaccactggaaggcccccctgcccaggcatccccgagcagcaccatgcttggtgagggctcccagcctgattggccagggggcagccgctatgacttggacgagattgatgcctactggctggagctcatcaactcggagcttaaggagatggagaggccggagctggacgagctgacattagagcgtgtgctggaggagctggagaccctgtgccaccagaatatggccagggccattgagacgcaggaggggctgggcatcgagtacgacgaggatgttgtctgcgacgtgtgtcgctctcctgagggcgaggatggcaacgagatggtcttctgtgacaagtgcaacgtctgtgtgcatcaggcatgctacgggatcctcaaggtgcccacgggcagctggctgtgccggacgtgtgccctgggtgtccagccaaagtgcctgctctgccccaagcgaggaggagccttgaagcccactagaagtgggaccaagtgggtgcatgtcagctgtgccctatggattcctgaggtcagcatcggctgcccagagaagatggagcccatcaccaagatctcgcatatcccagccagccgctgggctctgtcctgcagcctctgcaaggaatgcacaggcacctgcatccagtgttccatgccttcctgcgtcacagcgttccatgtcacatgcgcctttgaccacggcctggaaatgcggactatattagcagacaacgatgaggtcaagttcaagtcattctgccaggagcacagtgacgggggcccacgtaatgagcccacatctgagcccacggaacccagccaggctggcgaggacctggaaaaggtgaccctgcgcaagcagcggctgcagcagctagaggaggacttctacgagctggtggagccggctgaggtggctgagcggctggacctggctgaggcactggtcgacttcatctaccagtactggaagctgaagaggaaagccaatgccaaccagccgctgctgacccccaagaccgacgaggtggacaacctggcccagcaggagcaggacgtcctctaccgccgcctgaagctcttcacccatctgcggcaggacctagagagggttagaaatctgtgctacatggtgacaaggcgcgagagaacgaaacacgccatctgcaaactccaggagcagatattccacctgcagatgaaacttattgaacaggatctgtgtcgaggcctgtccacctcattccccatcgatggcaccttcttcaacagctggctggcacagtcggtgcagatcacagcagagaacatggccatgagcgagtggccactgaacaatgggcaccgcgaggaccctgctccagggctgctgtcagaggaactgctgcaggacgaggagacactgctcagcttcatgcgggacccctcgctgcgacctggtgaccctgctaggaaggcccgaggccgcacccgcctgcctgccaagaagaaaccaccaccaccaccaccgcaggacgggcctggttcacggacgactccagacaaagcccccaagaagacctggggccaggatgcaggcagtggcaaggggggtcaagggccacctaccaggaagccaccacgtcggacatcttctcacttgccgtccagccctgcagccggggactgtcccatcctagccacccctgaaagccccccgccactggcccctgagaccccggacgaggcagcctcagtagctgctgactcagatgtccaagtgcctggccctgcagcaagccctaagcctttgggccggctccggccaccccgcgagagcaaggtaacccggagattgccgggtgccaggcctgatgctgggatgggaccaccttcagctgtggctgagaggcccaaggtcagcctgcattttgacactgagactgatggctacttctctgatggggagatgagcgactcagatgtagaggccgaggacggtggggtgcagcggggtccccgggaggcaggggcagaggaggtggtccgcatgggcgtactggcctcctaa

SEQ ID NO: 172 - DNA, 1407 bp, Homo sapiens
atggcggcccggcttgtcagccgatgcggggctgtgcgtgcagctccccacagcggcccgctggtgtcctggcgcaggtggtccggcgcctcaacagacaccgtgtatgacgtggtggtgtcgggtggaggcctggtgggcgctgccatggcctgtgccttgggatatgatattcactttcatgacaagaaaatcctgttgctcgaagcaggtccaaagaaagtactggagaaattgtcagaaacttacagcaacagggtcagctccatttcccctggctctgcaacgcttctcagtagttttggtgcctgggaccatatctgcaacatgagatacagagcctttcggcgaatgcaggtgtgggacgcctgctcagaggccctgataatgtttgataaggataatttagatgacatgggctatatcgtggagaatgatgtcatcatgcatgctctcactaagcagttggaggctgtgtctgaccgagtgacggttctctacaggagcaaagccattcgctatacctggccttgtccatttcctatggccgactccagcccttgggttcatattaccctaggtgatggcagcaccttccagaccaaattgttgataggtgcagatggtcacaactccggagtacggcaggctgttggaatccagaatgtgagctggaactatgaccagtctgctgttgtggctactctgcatttatcagaggccacagaaaacaacgtagcctggcagagatttcttccctctgggcctattgctctgctcccgctctcagacaccttgagttccttggtttggtccacgtcccatgaacatgcagcagagctagttagcatggatgaggaaaaatttgtggatgccgttaactctgccttttggagtgatgctgaccacacggacttcatcgacacagctggtgccatgctgcagtatgctgtcagccttctgaagcccactaaggtctcggctcgccagctgcccccaagcgtagccagggtggatgccaaaagccgagttctgtttcctcttgggttgggacatgctgctgagtacgtcaggcctcgggtggcgctcattggggatgcagcccacagagtccatccgcttgcaggacagggtgtcaacatgggctttggggatatctccagcttggcccatcacctcagtacggcagccttcaatgggaaggacttaggttccgtgagccacctcacaggttatgaaacagaaagacagcgtcacaacactgctcttctggctgctacagacttactaaaaaggctctattctaccagtgcctccccgcttgtgttgctcaggacgtggggcttgcaggccacaaatgcagtgtctccactcaaagaacagattatggcctttgcaagcaaatga

SEQ ID NO: 173 - DNA, 735 bp, Homo sapiens
atgcagcctccgggcccgcccccggcctatgcccccactaacggggacttcacctttgtctcctcagcagacgcggaagatctcagtggttcaatagcatccccagatgtcaaattaaatcttggtggagattttatcaaagaatctacagctactacatttctgagacaaagaggttatggctggcttctggaagttgaagatgatgatcctgaagataacaagccactcttggaagaattggacattgatctaaaggatatttactacaaaatccgatgtgttttgatgccaatgccatcacttggttttaatagacaagtggtgagagacaatcctgacttttggggtcctctggctgttgttcttttcttttccatgatatcattatatggacagtttagggtggtctcatggattataaccatttggatatttggttcactaacaattttcttactggccagagttcttggtggagaagttgcatatggccaagtccttggagttataggatattcattacttcctctcattgtaatagcccctgtacttttggtggttggatcatttgaagtggtgtctacacttataaaactgtttggtgtgttttgggctgcctacagtgctgcttcattgttagtgggtgaagaattcaagaccaaaaagcctcttctgatttatccaatctttttattatacatttattttttgtcgttatatactggtgtgtga

SEQ ID NO: 174 - DNA, 879 bp, Homo sapiens
atggaggaagaagaatatgaacaaattccccaggagaatcccccagaagagctgtcccaggatcctgtgctggagctgtcaggaggtctaagggagaaagaacagaagaccccaaggagactgaggctcattctcatggggaaaacagggagtgggaagagtgcaacaggaaacagcatcctcggcagggacgtcttcgagtctaaactcagcaccagacccgtgaccaagacctcccagagacggagccgagagtgggctgggaaggagcttgaggtgattgacacacccaacattctgtccccccaggtctcgccagaggtggcagacgctatctgccaagccatcgtcttatccgccccagggccccacgccgtgctcctggtgacacaactgggccggttcacggatgaggatcagcaggtggtcaggcgcctgcaggaggtctttggagtgggggttctgggtcacaccatcctggtgttcacccggaaggaagacctggctggcggctccctggaagactatgtgcgagagaccaacaaccaggcccttgcctggctggatgtgacccttgcacggcgccattgcggcttcaacaacagggcacagggggaggagcaggaggcccaactgcgagagctcatggagaaagttgaagccattatgtgggaaaacgaaggagattattacagcaacaaggcttaccaatatacccagcaaaactttcggctgaaagaactacaggaaaggcaagtaagccagggccaaggctctgaggacgtgcctggtgaggagtcttggctggaaggactgtcccagatccagaaggaatctgaggaagcccacagatgcctgctggggaaggctgacctttga

SEQ ID NO: 175 - DNA, 1884 bp, Homo sapiens
atggctgctgagaagcaggtcccaggcggcggcggcggcggcggcagtggcggcggcggtggcagtggcggcggcggtagcggcggtggacgtggtgccggaggggaagaaaataaagaaaacgaacgcccttcggccggatcgaaggcaaacaaagaatttggggatagcctgagtttggagattcttcagattattaaggaatcccagcagcagcatggtttacggcatggagattttcagaggtacaggggctactgttcccgtagacaaagacgtcttcgaaaaacactcaacttcaagatgggtaacagacacaaattcacagggaagaaagtgactgaagagcttctgaccgataatagatacttgcttctggttctgatggatgctgaaagagcctggagctacgccatgcagctgaaacaggaagccaacactgaaccccgaaaacggtttcacttgttatctcgcctacgcaaagccgtgaagcatgcagaggaattggaacgcttgtgtgagagcaatcgcgtggatgccaagaccaaattagaggctcaggcttacacagcttacctctcaggaatgctacgttttgaacatcaagaatggaaagctgccattgaggcttttaacaaatgcaaaactatctatgagaagctagccagtgctttcacagaggagcaggctgtgctgtataaccaacgtgtggaagagatttcacccaacatccgctattgtgcatataatattggggaccagtcagccatcaatgaactcatgcagatgagattgaggtctgggggcactgagggtctcttggctgaaaaattggaggctttgatcactcagactcgagccaaacaggcagctaccatgagtgaagtggagtggagagggagaacggttccagtgaagattgacaaagtgcgcattttcttattaggactggctgataacgaagcagctattgtccaggctgaaagcgaagaaactaaggagcgcctgtttgaatcaatgctcagcgagtgtcgggacgccatccaggtggttcgggaggagctcaagccagatcagaaacagagagattatatccttgaaggagagccagggaaggtgtctaatcttcaatacttgcatagctacctgacttacatcaagctatcaacggcaatcaagcgtaatgagaacatggccaaaggtctgcagagggctctgctgcagcagcagccagaggatgacagcaagcgctcaccccggccccaggacctgatccgactctatgacatcatcttacagaatctggtggaattgctccagcttcctggtttagaggaagacaaagccttccagaaagagataggcctcaagactctggtgttcaaagcttacaggtgttttttcattgctcagtcctatgtgctggtgaagaagtggagcgaagcccttgtcctgtatgacagagtcctgaaatatgcaaatgaagtaaattctgatgctggcgccttcaagaacagcctaaaggacctgcctgatgtgcaagagctcatcactcaagtgcggtcagagaagtgctccctgcaggccgcagccatccttgatgcaaacgacgctcatcaaacagagacctcctcctcccaagtcaaggacaataagcctctggttgaacggtttgagacattctgcctggacccttcccttgtcaccaagcaagccaaccttgtgcacttcccaccaggcttccagcccattccctgcaagcctttgttctttgacctggccctcaaccatgtggctttcccaccccttgaggacaagttggaacagaagaccaagagtggcctcactggatacatcaagggcatctttggattcaggagctaa

SEQ ID NO: 176 - DNA, 1362 bp, Homo sapiens
atgtggtccccggagcgggaggccgaggccccagccgggggagacccggcgggccttctgccccccgagtgggaggaggacgaggagcgcatgtccttcctgttctccgctttcaagaggagtcgcgaggtgaacagcaccgactgggacagcaagatgggcttctgggcgccgttggtgctgagccacagccgccgccagggggtggtgcgcctgcgtctgcgggacttgcaggaggcctttcagcgcaaggggagcgtcccgctggggctggccacggtgctgcaggacctgctgcgtcgaggggagctgcagcgggagtcagacttcatggccagtgtagacagcagctggatctcctggggggttggggtcttcctgctgaagcctctcaagtggactctttctaacatgctgggagataataaggttccagctgaggaggtccttgtcgctgtggagctgttgaaggaaaaggctgaggaggtgtatcgtctgtatcagaactcgcccctctcctcccaccccgtggtggccctgtcagagctcagcaccctctgtgctaactcctgcccagatgagaggaccttctacttggtgttgctgcagctgcagaaggagaagagggtcacagtcctcgagcagaacggggagaagattgtgaagtttgcccgagggccacgtgccaaggtctctccagtcaatgacgtagatgttggggtgtaccagctgatgcagagtgaacagcttctctcacgcaaagtggagtccttatcccaggaagcagagaggtgtaaagaagaagcccgccgggcatgccgagcaggaaagaagcagctggcactgaggtctctcaaggccaagcaacggacagagaagcgcatcgaggccttgcatgccaagctggacactgttcaaggcatcctggaccggatctatgcctcccagacagatcagatggtttttaacgcctaccaggctggggtaggagcactcaaactctccatgaaggatgtcacagtggagaaggcagagagcctcgtggatcagatccaagagctctgtgacacccaggatgaagtttctcagactctggctggtggggtaacaaatggcttagattttgacagtgaagaactggagaaggaattggacatcctccttcaggataccaccaaagaacctttggatctgcctgacaacccccgcaataggcattttaccaacagcgtgcctaaccctaggatctcagatgctgaacttgaagctgaacttgagaaactgtccttatcagagggaggtttggtcccaagcagtaaatctccaaaaaggcaattggaaccgactctaaagccattgtag

SEQ ID NO: 177 - DNA, 2115 bp, Homo sapiens
atggcgcgcgagctgcgggcgctgctgctgtggggccgccgcctgcggcctttgctgcgggcgccggcgctggcggccgtgccgggaggaaaaccaattctgtgtcctcggaggaccacagcccagttgggccccaggcgaaacccagcctggagcttgcaggcaggacgactgttcagcacgcagaccgccgaggacaaggaggaacccctgcactcgattatcagcagcacagagagcgtgcagggttccacttccaaacatgagttccaggccgagacaaagaagcttttggacattgttgcccggtccctgtactcagaaaaagaggtgtttatacgggagctgatctccaatgccagcgatgccttggaaaaactgcgtcacaaactggtgtctgacggccaagcactgccagaaatggagattcacttgcagaccaatgccgagaaaggcaccatcaccatccaggatactggtatcgggatgacacaggaagagctggtgtccaacctggggacgattgccagatcggggtcaaaggccttcctggatgctctgcagaaccaggctgaggccagcagcaagatcatcggccagtttggagtgggtttctactcagctttcatggtggctgacagagtggaggtctattcccgctcggcagccccggggagcctgggttaccagtggctttcagatggttctggagtgtttgaaatcgccgaagcttcgggagttagaaccgggacaaaaatcatcatccacctgaaatccgactgcaaggagttttccagcgaggcccgggtgcgagatgtggtaacgaagtacagcaacttcgtcagcttccccttgtacttgaatggaaggcggatgaacaccttgcaggccatctggatgatggaccccaaggatgtccgtgagtggcaacatgaggagttctaccgctacgtcgcgcaggctcacgacaagccccgctacaccctgcactataagacggacgcaccgctcaacatccgcagcatcttctacgtgcccgacatgaaaccgtccatgtttgatgtgagccgggagctgggctccagcgttgcactgtacagccgcaaagtcctcatccagaccaaggccacggacatcctgcccaagtggctgcgcttcatccgaggtgtggtggacagtgaggacattcccctgaacctcagccgggagctgctgcaggagagcgcactcatcaggaaactccgggacgttttacagcagaggctgatcaaattcttcattgaccagagtaaaaaagatgctgagaagtatgcaaagttttttgaagattacggcctgttcatgcgggagggcattgtgaccgccaccgagcaggaggtcaaggaggacatagcaaagctgctgcgctacgagtcctcggcgctgccctccgggcagctaaccagcctctcagaatacgccagccgcatgcgggccggcacccgcaacatctactacctgtgcgcccccaaccgtcacctggcagagcactcaccctactatgaggccatgaagaagaaagacacagaggttctcttctgctttgagcagtttgatgagctcaccctgctgcaccttcgtgagtttgacaagaagaagctgatctctgtggagacggacatagtcgtggatcactacaaggaggagaagtttgaggacaggtccccagccgccgagtgcctatcagagaaggagacggaggagctcatggcctggatgagaaatgtgctggggtcgcgtgtcaccaacgtgaaggtgaccctccgactggacacccaccctgccatggtcaccgtgctggagatgggggctgcccgccacttcctgcgcatgcagcagctggccaagacccaggaggagcgcgcacagctcctgcagcccacgctggagatcaaccccaggcacgcgctcatcaagaagctgaatcagctgcgcgcaagcgagcctggcctggctcagctgctggtggatcagatatacgagaacgccatgattgctgctggacttgttgacgaccctagggccatggtgggccgcttgaatgagctgcttgtcaaggccctggagcgacactga

SEQ ID NO: 178 - DNA, 873 bp, Homo sapiens
atggccgccctgcgtgtcctgctgtcctgcgtccgcggcccgctgaggcccccggttcgctgtcccgcctggcgtcccttcgcctcgggtgctaactttgagtacatcatcgcagaaaaaagagggaagaataacaccgtggggttgatccaactgaaccgccccaaggccctcaatgcactttgcgatggcctgattgacgagctcaaccaggccctgaagaccttcgaggaggacccggccgtgggggccattgtcctcaccggcggggataaggcctttgcagctggagctgatatcaaggaaatgcagaacctgagtttccaggactgttactccagcaagttcttgaagcactgggaccacctcacccaggtcaagaagccagtcatcgctgctgtcaatggctatgcctttggcgggggctgtgagcttgccatgatgtgtgatatcatctatgccggtgagaaggcccagtttgcacagccggagatcttaataggaaccatcccaggtgcgggcggcacccagagactcacccgtgctgttgggaagtcgctggcgatggagatggtcctcactggtgaccggatctcagcccaggacgccaagcaagcaggtcttgtcagcaagatttgtcctgttgagacactggtggaagaagccatccagtgtgcagaaaaaattgccagcaattctaaaattgtagtagcgatggccaaagaatcagtgaatgcagcttttgaaatgacattaacagaaggaagtaagttggagaagaaactcttttattcaacctttgccactgatgaccggaaagaagggatgaccgcgtttgtggaaaagagaaaggccaacttcaaagaccagtga

SEQ ID NO: 179 - DNA, 4995 bp, Homo sapiens
atggcggcgcgccggggacggagagacggagtcgcgccgcccccgagtgggggccccggtccggaccctggcgggggagcccgcggcagtggttggggaagtcgaagccaagcgccgtatgggactttgggcgctgtgagcggcggcgagcaggtgctgctgcatgaggaggcgggtgattctggctttgtcagtctctctcggctgggcccatctctgagggacaaggacctggaaatggaggagctaatgctgcaggatgagacactgctggggaccatgcagagctacatggatgcctcccttatctccctcattgaggattttgggagccttggagagagcaggttatctctggaggaccagaatgaagtgtcgctgctcacggctctgacggagatcttggacaatgcagattctgagaacctttctccatttgacagcattcctgattcggagctgcttgtgtcaccccgggagggctcctctctgcacaagctgcttactctctctcggacacccccagaacgtgacctcatcaccccagttgacccactggggcccagtacaggcagcagtagagggagtggggttgaaatgtctcttccagatccctcttgggacttctccccaccctctttcttagagacctcttcccccaagcttcctagctggagacccccaagatcaagaccacgctggggccaatccccacctccccagcagcgcagtgatggagaagaagaggaggaggtggccagcttcagtggccagattcttgccggggagcttgacaactgtgtgagcagtatcccggacttccccatgcatttggcctgccctgaggaggaagataaagcaacagcagcagagatggcagtgccagcagctggtgatgagagcatctcctccctgagtgagctggtgcgggccatgcacccatactgcctgcccaacctcacccacctggcatcacttgaggatgagcttcaggagcagccagatgatttgacactgcctgagggctgcgtagtgctggagattgtggggcaggcagccacagctggcgatgacctggagatcccagttgtggtgcgacaggtctctcctggaccccggcctgtgctcctggatgactcgctagagactagttctgccttgcagctgcttatgcctacactggagtcagagacagaggctgctgtgcccaaggtaaccctctgctctgagaaagaggggttgtcattgaactcagaggagaagctggactcagcctgcttattgaagcccagggaggtcgtggagccggtggtgcccaaggagcctcagaacccacctgccaatgcagcaccaggttcccagagagctcgaaagggcaggaagaagaagagcaaggagcagccagcagcctgtgtggaaggctatgccaggaggctgaggtcatcttctcgcgggcagtctactgtaggtacagaagtgacctctcaggtagacaacttgcagaaacagcctcaggaagaacttcaaaaagagtctgggcctctccagggtaaggggaagccccgggcttgggctcgggcctgggcagctgccttggagaattctagccctaagaacttggagagaagtgctggacaaagtagtcctgctaaagaaggccctctagacctctacccaaagctggctgacactatccaaaccaatcctataccaacccatctctcattggtcgactctgcccaagccagccccatgccagttgactctgttgaagctgatcccactgcagttggccctgttctagctggccctgtacctgttgaccctgggttggttgaccttgcttcaaccagctcagaactggttgagcctctcccggctgagccagtgctgatcaacccagtcctggctgactcagcagcagttgaccctgcagtggttcccatctcagataacttgccaccagttgatgctgtcccgtctggcccagcaccagttgatctagcactggttgaccctgttcctaatgacctgactccagttgacccagtgctagttaagtccagaccaactgatcccagacgtggtgcagtgtcatcagccctggggggttcagcaccccagctcctcgtggagtcagagtccttggacccaccaaagaccatcatccctgaagtcaaagaggttgtggattctctgaaaattgaaagtggtaccagtgctacaacccatgaagccagacctcggcctctcagcttatctgagtaccggcgacgaaggcagcaacgccaagcagaaacagaagagagaagtccacagcccccaactgggaagtggcctagccttccagagactcccacagggctggcagacatcccttgtcttgtcatcccaccagccccagccaagaagacagctctgcagagaagccctgaaacaccccttgagatttgccttgtgcctgtaggtcccagccctgcttctcctagtcctgagccacctgtaagcaaacctgtggcctcatctcccactgagcaggtgccatcccaggagatgccactgttggcgagaccttcccctcctgtgcagtctgtgtcccctgctgtgcccacacctccctcgatgtctgctgccctgcctttccctgcaggtgggcttggcatgccccccagtctgcccccacctcccttgcagcctcctagtcttccattgtctatggggccagtactacctgatccgtttactcactatgcccccttgccatcctggccttgttatcctcatgtgtccccttctggctatccttgcctgccccccccaccaacggtgcccctagtgtctggtactcctggtgcctatgccgtgcctcccacttgcagtgtgccttgggcaccccctcctgccccagtctcaccttacagttccacatgtacctatgggcccttgggatggggcccagggcctcaacatgctccattctggtctactgttcccccacctcctttgcctccagcctccattgggagagctgttccccaacctaaaatggagtctaggggcactccagctggccctcctgaaaatgtacttcccttgtcgatggctcctcccctcagtcttgggctacctggccatggagctcctcagacagagcctaccaaggtggaggtcaagccagtgcctgcatctccccatccgaaacacaaggtgtctgccctggtgcaaagtccccagatgaaggctctagcatgtgtgtctgctgaaggtgtgactgttgaggagcctgcatcagagaggctaaagcctgagacccaagagaccaggcccagggagaagccccccttgcctgctaccaaggctgttcccacaccaaggcagagcactgtccccaagctgcctgctgtccacccagcccgtctaaggaagctgtccttcctgcctaccccacgtactcagggttctgaagatgtggtacaggctttcatcagtgagattggaattgaggcatcggacctgtccagtctgctggagcagtttgagaaatcagaagccaaaaaggagtgtcctcctccggctcctgctgacagcttggctgtaggaaactcaggcggcgttgacattccccaggagaagaggcccctagaccggttacaagccccagaactggccaacgtggcagggctcacccctccagctacccctccccaccagttatggaagcccctggctgctgtctcactgctggccaaagccaaatctcctaagtccaccgcccaggagggaaccctgaagcctgaaggagttacggaggccaaacatccagctgcagttcgcctccaagaaggggtccatggccctagtcgagtccatgtgggctctggggaccatgactattgtgtccggagcaggacccccccaaaaaagatgcctgccctagtcattccagaggtgggctcccgatggaatgtcaagcgccatcaggacatcaccatcaaacctgtcttgtccttgggcccagctgcccctccgcccccatgcatagctgcctcccgggagccgcttgatcacaggactagcagtgagcaggcagatccctcagcaccctgccttgccccatccagcttgctgtcccctgaggcctcaccctgccggaatgacatgaacactaggactccccctgaaccctcagccaagcagcggtcaatgcgctgttaccgaaaagcctgcaggtcagccagcccctcaagccagggctggcagggccgccgaggccgcaacagccgttctgtcagctctgggtccaaccggactagcgaagcatcttcctcatcctcatcatcgtcttcctcatcccgatctcggtccaggtccctctcccccccacacaagaggtggcgaaggtccagctgtagttcctctggacgttctcgaagatgctcttcctcttcttcgtcatcatcttcctcttcgtcttcctcatcctcatcatccagttctcgaagccgctcacgatccccatccccccgccggagaagtgacaggaggcggcggtacagctcttatcgttcacatgaccattaccaaaggcaaagagtgctacaaaaggagcgtgcaatagaagaaagaagggtggtcttcattggaaagatacctggccgcatgactcgatcagagctgaaacagaggttctccgtttttggagagattgaggagtgcaccatccacttccgtgtccaaggggacaactacggcttcgtcacttatcgctatgctgaggaggcatttgcagccattgagagtggccacaagctgcggcaggcagatgagcagccctttgatctctgctttgggggccgaaggcagttctgcaagaggagctattctgatcttgactccaaccgggaagactttgacccagcacctgtaaagagcaaatttgattctcttgactttgacacattgttgaaacaggcccagaagaacctcaggaggtaa

SEQ ID NO: 180 - DNA, 1044 bp, Homo sapiens
atggctcagagcagagacggcggaaacccgttcgccgagcccagcgagcttgacaacccctttcaggacccagctgtgatccagcaccgacccagccggcagtatgccacgcttgacgtctacaacccttttgagacccgggagccaccaccagcctatgagcctccagcccctgccccattgcctccaccctcagctccctccttgcagccctcgagaaagctcagccccacagaacctaagaactatggctcatacagcactcaggcctcagctgcagcagccacagctgagctgctgaagaaacaggaggagctcaaccggaaggcagaggagttggaccgaagggagcgagagctgcagcatgctgccctggggggcacagctactcgacagaacaattggccccctctaccttctttttgtccagttcagccctgctttttccaggacatctccatggagatcccccaagaatttcagaagactgtatccaccatgtactacctctggatgtgcagcacgctggctcttctcctgaacttcctcgcctgcctggccagcttctgtgtggaaaccaacaatggcgcaggctttgggctttctatcctctgggtcctccttttcactccctgctcctttgtctgctggtaccgccccatgtataaggctttccggagtgacagttcattcaatttcttcgttttcttcttcattttcttcgtccaggatgtgctctttgtcctccaggccattggtatcccaggttggggattcagtggctggatctctgctctggtggtgccgaagggcaacacagcagtatccgtgctcatgctgctggtcgccctgctcttcactggcattgctgtgctaggaattgtcatgctgaaacggatccactccttataccgccgcacaggtgccagctttcagaaggcccagcaagaatttgctgctggtgtcttctccaaccctgcggtgcgaaccgcagctgccaatgcagccgctggggctgctgaaaatgccttccgggccccgtga

SEQ ID NO: 181 - DNA, 3421 bp, Homo sapiens
gagttgggctgggccggccgacgaatcacgaggcttcgcacccggatatggttatgggctcggaaatctagttcgggaaaagtgtgaggggctcttcacgtggggaaggaacagcaggcgcggaggagggggcaagcgtgtgtgagattcagtggtccatgcgtgcgtttgtcgtgtaagggtcattcctggggtttggagtgggggaacaaatcaatgtggctgtttttccgtggaaagaattcccactgcagtgtcccggagcctgcgtgtggtgggcaagctcctcaaatggtatctcacagggaataggggagtcttgaaaacgcagcttcggcagtaggaacatgaacctcttacctaaaagttccagggagtttggctccgttgactattgggagaagttcttccagcagcgaggaaagaaagctttcgagtggtatggaacctacctggaactgtgcggggtgctacataaatatatcaagcccagggaaaaggtgctggtgattgggtgtggcaactcagaactgagtgagcaactgtatgatgtgggctatcgggatatagtgaacatcgacatcagtgaggttgtcatcaagcaaatgaaggaatgtaatgccacccgacggccccagatgagcttcttgaagatggacatgacgcagatggagtttcctgatgcctcgttccaggtggtgttggacaagggcaccctggatgctgtcctgacagatgaggaagagaagaccttacaacaggtggacaggatgctggctgaggttggccgtgtcctgcaggtgggcggtcgctatctctgcatctccctggctcaggctcacatcctgaagaaagcagtgggccacttctcccgggaggggtggatggtgagggtgcaccaagtggccaacagccaggaccaggtgttggaagcagagcctcagttctccttgcctgtctttgccttcatcatgaccaagttcaggccagtccctggctctgcccttcagatctttgagctgtgtgctcaggagcagcgcaagcctgtgcggctggagagtgccgagcggctggccgaggcggtgcaggagcgacagcagtatgcctggctgtgcagccagctgcgccgcaaggccaggctggggagtgtgtctctggacttgtgcgatggggacacgggggagccacgctacaccctccacgtggtggacagccccactgtgaaaccatcgcgggacaatcattttgcgattttcatcatccctcagggccgggagaccgagtggctctttggcatggatgagggccggaaacagctggcggccagtgctggcttcaggaggttgattacagtggcccttcaccgaggtcagcagtatgaaagcatggaccacatccaagctgagctgtcggctagagtcatggagctggccccagctgggatgcccacccagcagcaggtcccctttctgtctgtgggtggggacattggggtccggaccgttcagcaccaagactgcagccccttgagcggtgactatgtcattgaggatgtgcaaggggatgacaagcgatacttccgtcgactgatcttcctcagcaacaggaatgtggtgcagtccgaagccaggttgctgaaggatgtgtctcacaaagcccagaagaagcggaaaaaggacaggaagaagcagcggcctgctgatgcggaggacctccctgcagccccggggcagtccattgataagagttacctgtgttgtgaacaccacaaagccatgatcgctggccttgccctgctgagaaacccagagctactcctagagatcccactggcattgttggtggtaggcctgggcgggggcagcctccccctctttgtccacgatcattttccaaagtcctgcattgatgctgtggagatcgatccctccatgttggaagtggccacccagtggtttggcttctcccagagtgaccgaatgaaggtccacattgcagatggcctggactatatcgccagcttggcaggaggaggagaagcacggccttgctacgatgtcataatgtttgatgttgacagtaaggacccaacactgggaatgagttgtccgcccccagcatttgtggagcaatcttttctacagaaggttaaaagcatcttgactcctgaaggtgtttttattctcaaccttgtgtgccgagacttggggctaaaagactcagtgctggctgggctcaaggcagtgttccccctcctatatgtccggcgaattgagggtgaagtgaatgagatcctgttctgtcagctgcaccctgagcaaaaacttgccacaccagagctcctagaaacagcccaggctttggagcggaccctgaggaagcctgggaggggttgggatgacacgtatgtcttgtcagatatgctcaagacggtgaaaattgtgtgactgcttaggccaagcagccctcctgcctagactgaccttggactcccagcctgccagagaatgaagaaatacaacgcacagtacttttgaagcttcgtatttttcttggtttcacactcagctacatgtgacctccagcttggtgaggttgcctgaagattagggaaaataaaaatgtccttcccatcttgtcctcttcagtaccacttgggttggtttgtctttgcttcctacaccacgtccttgagtggagttccctgctgaagcccctagcacacactgcatgccttaacaagtgtgtgcaagcccctcagaactcaagacatccaaattttattgcgtctctacttatactggtttgcttttgatttattcctctattagttctataggagtgatctcaagtgagatagcagagcaagatgccaaaagaccataaatagagtaaggtttctatagatgtgagacagatttgagagagcatttactctgtctccctgtggatgaaactgctgctgaaatggttccaatttttaggaatctgcttacccacttcattatttgacagctttccttggtgacccaaaccttgtagcctaagccatttgtctttttctcagtggagggagtgtatggacctggccccatggctttgcatgttagagacctggcagactaaagtctctagtgtttgtttgctcacatttgctgagtgacagctatgtgccagactgcataaagggtggtggcagaagtgaaaatgtttaagaatgaccaaaaacattagtaatgaaagttaatgtgttccaggcattcttctaagtggtttacatgcactgtctcatttaatctgagataaaggatacttaagcccaaactatatctaaacccaaatctcacttggctggaaacatcaatcttaaccatttattcagaaccattaaaccaatgattccaagaaaaaaaaaaaaaaa

SEQ ID NO: 182 - DNA, 1656 bp, Homo sapiens
atgcgggactacgacgaggtgatcgccttcctgggcgagtgggggcccttccagcgcctcatcttcttcctgctcagcgccagcatcatccccaatggcttcaatggtatgtcagtcgtgttcctggcggggaccccggagcaccgctgtcgagtgccggacgccgcgaacctgagcagcgcctggcgcaacaacagtgtcccgctgcggctgcgggacggccgcgaggtgccccacagctgcagccgctaccggctcgccaccatcgccaacttctcggcgctcgggctggagccggggcgcgacgtggacctggggcagctggagcaggagagctgcctggatggctgggagttcagccaggacgtctacctgtccaccgtcgtgaccgagtggaatctggtgtgtgaggacaactggaaggtgcccctcaccacctccctgttcttcgtaggcgtgctcctcggctccttcgtgtccgggcagctgtcagacaggtttggcaggaagaacgttctcttcgcaaccatggctgtacagactggcttcagcttcctgcagattttctccatcagctgggagatgttcactgtgttatttgtcatcgtgggcatgggccagatctccaactatgtggtagccttcatactaggaacagaaattcttggcaagtcagttcgtattatattctctacattaggagtgtgcacattttttgcagttggctatatgctgctgccactgtttgcttacttcatcagagactggcggatgctgctgctggcgctgacggtgccgggagtgctgtgtgtcccgctgtggtggttcattcctgaatctccccgatggctgatatcccagagaagatttagagaggctgaagatatcatccaaaaagctgcaaaaatgaacaacatagctgtaccagcagtgatatttgattctgtggaggagctaaatcccctgaagcagcagaaagctttcattctggacctgttcaggactcggaatattgccataatgaccattatgtctttgctgctatggatgctgacctcagtgggttactttgctctgtctctggatgctcctaatttacatggagatgcctacctgaactgtttcctctctgccttgattgaaattccagcttacattacagcctggctgctattgcgaaccctgcccaggcgttatatcatagctgcagtactgttctggggaggaggtgtgcttctcttcattcaactggtacctgtggattattacttcttatccattggtctggtcatgctgggaaaatttgggatcacctctgctttctccatgctgtatgtcttcactgctgagctctacccaaccctggtcaggaacatggcggtgggggtcacatccacggcctccagagtgggcagcatcattgccccctactttgtttacctcggtgcttacaacagaatgctgccctacatcgtcatgggtagtctgactgtcctgattggaatcctcaccctttttttccctgaaagtttgggaatgactcttccagaaaccttagagcagatgcagaaagtgaaatggttcagatctgggaaaaaaacaagagactcaatggagacagaagaaaatcccaaggttctaataactgcattctga

SEQ ID NO: 183 - DNA, 2154 bp, Homo sapiens
atggaaggggcccatgcctcccttagcttagaggacgaagtctctggggctggcagccgccaacgcccgctagaggggaagggcggcgagacccctgctgccgaggagccggggtccctgaagaactacgctgtcttcgccacaagggatgtttcagcagcccctgagaaggaagaggaggaagctgagggcccgctgagggcgcaggacctgagggagtcctacatccagctcgtccagggtgtgcaggagtggcaggatggttgcatgtaccagggggagtttgggttgaacatgaagcttggatatggcaaattctcttggcccacaggcgagtcataccatgggcagttttaccgggaccactgccatggcctgggtacctacatgtggccagatggctccagtttcacgggcacattttacctcagccaccgagaaggctacggcaccatgtacatgaagacacggcttttccagactcactgccacaacgacattgtcaaccttctcctggactgtggggccgacgtgaacaagtgctcagatgagggtctcacggcactcagcatgtgtttcctcctccactaccccgcccagtccttcaagcccaatgttgctgaacggaccatacctgagccccaggaacctccaaaattcccagttgttccaatcctttcatcatcatttatggacacaaacctggagtctctgtactatgaggtgaacgtgccttcccagggtagctatgagctgaggccaccgccagcaccactgctcctgccacgcgtctcaggcagccacgagggcggccacttccaggacaccgggcagtgtggggggtccatagaccacaggagcagctctctgaagggggactccccgttggtgaagggcagccttggccatgtggaaagcgggcttgaggacgtgttgggaaacacagaccggggcagtctgtgcagtgctgagacgaaatttgagtccaacgtgtgtgtgtgcgacttctccatcgagctctcgcaggccatgctggagagaagcgcccagtcccacagcttgctgaagatggcctcgccctcaccgtgcaccagcagcttcgacaaagggaccatgcggaggatggcgctgtccatgatcgagcggaggaagcgctggcggaccatcaagctgctgctgcgccggggcgcggaccccaacctgtgctgcgtgcccatgcaggtcctgttccttgctgtgaaggccggggacgtggatggggtgaggctgctgctggagcacggggcgaggaccgacatctgctttccgccgcagctgagcaccctgacaccactccacatcgctgccgcccttcctggggaggagggggtacagattgtggagctgctgttgcatgccatcaccgatgtggacgccaaggcatccgacgaggacgacacttacaagcccggcaaggttgtgaaggagctcctgacccagggagctgaccccaacctgcccctgaccaaaggcttgggcagtgccctgtgtgttgcctgtgacctgacctacgagcaccagaggaacatggacagcaagctggccctgattgaccgactcatcagtcacggggccgacatcctgaagcctgtaatgctcaggcagggagaaaaggaggcagtgggcacagccgtggactatggctacttcagattcttccaggaccggaggattgcccgctgccccttccacacgctgatgccagcagagcgcgagacgttcctggcgcggaagcggctcctggagtacatgggcttgcagctacggcaggctgtctttgccaaggagagccagtgggaccccacgtggctgtacctgtgcaagagagcggagctgatccccagccacaggatgaagaagaagggccccagcctgcccaggggcctggatgtgaaggagcaggggcaaattcccttcttcaagttctgctaccagtgtggccgctccatcggggtccgcctcttgccctgccctcgctgctacgggatcctgacctgcagcaagtactgcaagaccaaggcctggaccgagttccacaagaaggactgcggggacctggtggccatcgtgacacaactggagcaagtttccaggaggagagaagaattccagtga

SEQ ID NO: 184 - DNA, 984 bp, Homo sapiens
atgttcccctcgcggaggaaagcggcgcagctgccctgggaggacggcaggtccgggttgctctccggcggcctccctcggaagtgttccgtcttccacctgttcgtggcctgcctctcgctgggcttcttctccctactctggctgcagctcagctgctctggggacgtggcccgggcagtcaggggacaagggcaggagacctcgggccctccccgtgcctgccccccagagccgccccctgagcactgggaagaagacgcatcctggggcccccaccgcctggcagtgctggtgcccttccgcgaacgcttcgaggagctcctggtcttcgtgccccacatgcgccgcttcctgagcaggaagaagatccggcaccacatctacgtgctcaaccaggtggaccacttcaggttcaaccgggcagcgctcatcaacgtgggcttcctggagagcagcaacagcacggactacattgccatgcacgacgttgacctgctccctctcaacgaggagctggactatggctttcctgaggctgggcccttccacgtggcctccccggagctccaccctctctaccactacaagacctatgtcggcggcatcctgctgctctccaagcagcactaccggctgtgcaatgggatgtccaaccgcttctggggctggggccgcgaggacgacgagttctaccggcgcattaagggagctgggctccagcttttccgcccctcgggaatcacaactgggtacaagacatttcgccacctgcatgacccagcctggcggaagagggaccagaagcgcatcgcagctcaaaaacaggagcagttcaaggtggacagggagggaggcctgaacactgtgaagtaccatgtggcttcccgcactgccctgtctgtgggcggggccccctgcactgtcctcaacatcatgttggactgtgacaagaccgccacaccctggtgcacattcagctga

SEQ ID NO: 185 - DNA, 1113 bp, Homo sapiens
atgagtgcctctgcggccaccggggtcttcgtgctgtccctctcggccatcccggtcacctatgtcttcaaccacctggcggcccagcatgattcctggactattgtaggggttgctgccctcatcctgttcctggtagcactgctggctcgtgtcctcgtcaaaagaaaaccaccccgggacccactgttctatgtgtatgcagtttttggatttaccagcgtggtgaacctcatcataggactggagcaagatggaatcattgacgggttcatgacacactacttgagagagggtgaaccgtatctgaacaccgcatatgggcacatgatctgctactgggatggctctgctcattatctgatgtacctggtgatggtggcagccatagcatgggaggaaacttatagaaccattggcctatattgggttggatctattattatgagtgttgttgtttttgtgccaggaaacattgtagggaagtatggaacacgaatttgccctgcttttttcttaagcataccatatacttgtcttcctgtctgggctggtttcagaatctataatcagccatcagaaaattataattacccctcaaaggttattcaagaagcccaagcgaaagacctgctgagaagaccatttgatttaatgttggttgtgtgtctcctcctggcaactggattttgcctgttcagaggtttgattgctttggattgcccatctgagctctgccgattatatacgcaatttcaagagccctatctaaaggatcctgctgcttatcctaaaattcagatgctggcatatatgttctattctgttccttactttgtgactgcactgtatggcttagtggttcctggatgttcctggatgcctgacatcacattgatacatgctggaggtctggctcaggctcagttttctcacattggtgcatctcttcatgctagaactgcttatgtctacagagtccctgaagaagcaaaaatcctttttttagcattaaacatagcatatggagttcttcctcagctcttggcctatcgttgtatctacaaaccagagttcttcataaaaacaaaggcagaagaaaaagtggaataa

SEQ ID NO: 186 - DNA, 3465 bp, Homo sapiens
atggggctgctgctcatgatcctggcgtcggccgtgctgggttccttcctcacgctcctcgcccagttcttcctgctgtaccgcagacagcccgagccgccggcggacgaggccgcccgcgcgggcgagggcttccgctacatcaagccagtgccgggcctgctcctaagggagtacctttatggcggcggccgggatgaggagccctccggagcggcccctgagggcggcgcgacccccaccgcggcccccgagacccccgccccgccgacgcgggagacttgctacttcctcaacgccaccatcctattcctgttccgggagttgcgggacaccgcgctgacccgccgctgggtcaccaagaagatcaaggtggagttcgaggagctgctgcagaccaagacggccgggcgcctgctggaggggctgagcctgcgggacgtgttcctgggcgagacggtgcccttcatcaagaccatccggctcgtgcggccagtcgtgccctcggccaccggggagcccgatggccctgaaggggaggcgctgcccgccgcctgccccgaggagctggccttcgaggcggaggtggagtacaacgggggcttccacctggccatcgacgtggacctggtcttcggcaagtccgcctacttgtttgtcaagctgtcccgcgtggtgggaaggctgcgcttggtctttacgcgcgtgcccttcacccactggttcttctccttcgtggaagacccgctgatcgacttcgaggtgcgctcccagtttgaagggcggcccatgccccagctcacctccatcatcgtcaaccagctcaagaagatcatcaagcgcaagcacaccctaccgaattacaagatcaggtttaagccgttttttccataccagaccttgcaaggatttgaagaagatgaagagcatatccatatacaacaatgggcacttactgaaggccgtcttaaagttacgttgttagaatgtagcaggttactcatttttggatcctatgacagagaggcaaatgttcattgcacacttgagttaagcagtagtgtttgggaagaaaaacagaggagttctattaagacggttgaattaataaaaggaaatttacaaagtgttggacttacacttcgtcttgtccagtcaactgatgggtatgctgggcacgtcatcattgaaactgtggctccaaactcgcctgctgcaattgcagatcttcagcggggagatcgacttatcgccattggaggtgtgaaaatcacatcaacactgcaagtgttgaagcttatcaagcaggctggtgaccgagtcctggtgtactatgaaaggcctgttggccagagtaatcaaggtgcagtgctgcaagataactttggccagttggaagaaaactttttgtcaagctcatgccaatcgggttatgaagaggaagctgccgggttgacagtagatactgaaagtagagagctggattctgaatttgaagacttggcaagtgatgtcagagcacaaaatgagttcaaagatgaggcacaatcattaagtcatagtcccaaacgtgttccaacaacactttctattaaaccccttggagctatatcaccagttttaaaccgtaaattagctgtaggaagtcacccactaccaccgaaaattcagtccaaagatggaaataaacctccacccctaaaaacttctgagataacagacccagcacaagtgtcaaaaccaacccaaggatctgctttcaaaccacctgtgccaccacgaccacaagcgaaagttcctttgccttccgccgatgctccaaatcaggcagaaccagatgttctcgttgaaaagccagagaaggtggtgccacctcctcttgtagataaatctgctgaaaagcaagcaaaaaatgtggatgccatagacgatgcagctgcacctaagcaatttttagcaaagcaagaagtggccaaagatgtcacttcagaaacttcctgccctactaaggacagttcggacgaccgtcaaacatgggaatcatcagaaattctttatcgtaataagctaggaaaatggacaagaaccagagcatcctgtttgtttgacatagaagcctgtcacaggtacttaaacattgcattgtggtgcagggatcctttcaagttgggaggtctcatctgtttggggcatgttagtttaaaacttgaagatgtggctttaggatgcctagctacatcaaacacggaatacctttccaaattgagactggaagccccctcacctaaggctatagtcactagaaccgcactacgcaatctgagtatgcaaaagggattcaatgacaaattttgctatggtgacattactattcacttcaaatatttgaaagaaggagaatcagaccaccatgtagttactaacgtagaaaaagaaaaagaaccccatttggttgaagaagtttctgttctccctaaagaggagcaatttgttggacagatgggtttaacagaaaacaaacacagttttcaggatactcagttccagaacccaacatggtgtgactactgtaagaaaaaagtttggactaaagcagcttcccagtgtatgttttgtgcttatgtttgccataaaaaatgtcaagaaaagtgtctagctgagacttctgtttgtggagcaactgataggcgaatagacaggacactgaaaaaccttaggctggaaggacaggaaaccctcttaggcctgcctcctcgtgttgatgctgaagctagcaagtcagtcaataaaacaacaggtttgacaaggcatattatcaatactagttctcgtttattaaatttgcgtcaagtctctaaaactcgcctttctgaaccaggaaccgatctcgtagaaccttcaccaaaacacacacccaacacgtcagacaacgaaggcagtgacacggaggtctgtggtccaaacagtccttctaaacggggaaacagcacaggaataaagttagtgagaaaagagggtggtctggatgacagtgttttcattgcagttaaagaaattggtcgtgatctgtacaggggcttgcctacagaggaaaggatccagaaactagagttcatgttggataagctacagaatgaaattgatcaggagttggaacacaataattcccttgttagagaagaaaaagagacaactgatacaaggaaaaaatcacttctttctgctgccttagctaaatcaggtgaaaggctacaagctctaacacttcttatgattcactacagagcaggcattgaagatatagaaactttagaaagtctgtctttagaccagcactccaaaaaaataagcaagtacacagatgatacagaagaagaccttgataatgaaataagccaactaatagactctcagccattcagcagcatatcagatgacttatttggcccatccgagtctgtgtag

SEQ ID NO: 187 - DNA, 2856 bp, Homo sapiens
ctcagggaggcggggctcgttccacagggacaccacgacggctcgcggcccccagcctctaccccgctccggatccgggatctgagcgccggccgcggtgcccaggcactcccttggcgggccggatggcggaccccggcccagatcccgaatctgagtcggaatcggtgttcccgcgggaggtcgggctctttgcagactcttactcggagaagagccagttctgtttctgtgggcatgtgctgaccatcacgcagaactttgggtcccgcctcggggtggcggcgcgcgtgtgggacgcggccctgagcctgtgcaattatttcgagagtcaaaatgtggatttccgaggcaagaaggtgatcgaactgggtgcggggacaggcatcgtggggatcttggcagcgctgcagggagcttatggtctagtgagggagacagaggacgatgtcatagaacaagaactctggcgaggtatgcgtggagcctgtggacatgctctatccatgtctaccatgactccctgggaatccatcaagggaagctctgtcagggggggatgttaccatcactgacctgcccctggccctagaacagatccagggcaacgtccaggccaatgtgccagctggaggccaggcccaggtgcgtgccttgtcctgggggattgaccatcatgtcttccctgcaaactatgacctggtgctgggggctgatatcgtgtacctggaacccaccttccctctgctgctggggaccctccaacacctgtgcaggccccatggcaccatctatctggcctccaagatgagaaaggagcatgggacagagagcttctttcagcacctcctgccccagcatttccaactggagctggctcagcgggatgaggatgaaaatgtcaacatctatagggccaggcacagggaaccaagacctgcttgacatcacccttgctgttcttctcaatctcttgctctaatgaaggaactgtgtatctcaaaaaccatatttccagagccacaaacatgaggaccaaaaaggatggatttccctggcctctctcactttcctccttccctctttgttaccccagatactcttgggcaggtgcagtgaggtgcctgcttacaaggaatcccagagttctggcagcactagtgttagaacaccaaggaggttcctggctcctgttctcagagaaggaggatggtaaggtatccaggatttttagggggtaagggagatatatgggatgtgagagcagtgattgtagacagactgtcactgatcacttccattcctgttgctgtttacacagaatggactttaaaaaaattctgtgggatttttttttctttttttctttttttttgagacagggtctcactctgtcatccaggctggagtgcagtggtgtgatcacagctcactgcagcctcaacctctgaaggcccagatgatcttcctgcctcagctccccaagtagctgggactagaggcatgcgccaccacacccggctaatttttgtattttcagtagagacagggtttcgccatgttgcccagggtggtctcaaactcctgggctcaagtgatccacccgccttgcctcccaaagtgctgggattgcaggcatggcccactgtgctagcctaggatttttttttttttttaagaaagaattaagccttaaaaatctattgtgcaagaacccaacttttactcaggagctgagaaggaagaagcctcaaaccacccatttcctgctttttagagatagagtctagtggaaccatggctctaactgggtcaagtcctcctagctctgaagctaaggctgcagagctgtcctttggactgtatttcttcatgctttccagagttagagccttgatcacggaacatcattgtgtgcagaagaatactgtacctagtactaagttcttttcatctttgatttttctttagcttcatcagtccttccttcctaatctctaatcccctgaagcctaacacagttcctaatgtgttttgccttaacctcttttctcttcccacattggtacttctggttggggctctctttacttactgcttaggcacatagtcaccttctctggactccctgcttccatgctttctccttcagtccattccgcaaactcttgtgatcttccaaaattagctctgattagctttcacttcctgtagaagcaagaacaagctcctctgcttggtacttagtctgtgtccatgtgatccaaaattaccttcctattgcatttcctactcctttgctacgtgtattggacctctggccaaattacaaaagatgtactctttgttctctaaaaccacactaaagttttctgacttctttcacactctttatgataatcctctgcctgaaaggctattgccacctgtcaaaatcttcattattctttgcctctttcctgagcctcttgcttgaatgtgatttctttctccctgagacccataaggttcatcttatgggaccttaatttgtcttgcatggacatttgtgattctcattttctcaccattaaattaccttggagggtagggctgtggtttactcctgtctaaacccctgaagcctaacacagttcctggcacacaacaggtgttcaacagatattgtgctcattcaataaatatttactcgctttgtttaatggattccacccctgccttcctaggtgaccttggacaaattctcgaacccattcaccaaccacacaagtttgttgtgagtcataaatggataatgaatataaatgcgcattgaaaataaacataaaatgttacccacaaaaaaaaaaaaaaaaa

SEQ ID NO: 188 - DNA, 1119 bp, Homo sapiens
atgtcgaggaggagatttgattgccgaagtatttcaggcctactaactacaactcctcaaattccaataaaaatggaaaactttaataatttctatatacttacatctaaagagctagggagaggaaaatttgctgtggttagacaatgtatatcaaaatctactggccaagaatatgctgcaaaatttctaaaaaagagaagaagaggacaggattgtcgagcagaaattttacacgagattgctgtgcttgaattggcaaagtcttgtccccgtgttattaatcttcatgaggtctatgaaaatacaagtgaaatcattttgatattggaatatgctgcaggtggagaaattttcagcctgtgtttacctgagttggctgaaatggtttctgaaaatgatgttatcagactcattaaacaaatacttgaaggagtttattatctacatcagaataacattgtacaccttgatttaaagccacagaatatattactgagcagcatataccctctcggggacattaaaatagtagattttggaatgtctcgaaaaatagggcatgcgtgtgaacttcgggaaatcatgggaacaccagaatatttagctccagaaatcctgaactatgatcccattaccacagcaacagatatgtggaatattggtataatagcatatatgttgttaactcacacatcaccatttgtgggagaagataatcaagaaacatacctcaatatttctcaagttaatgtagattattcggaagaaactttttcatcagtttcacagctggccacagactttattcagagccttttagtaaaaaatccagagaaaagaccaacagcagagatatgcctttctcattcttggctacagcagtgggactttgaaaacttgtttcaccctgaagaaacttccagttcctctcaaactcaggatcattctgtaaggtcctctgaagacaagacttctaaatcctcctgtaatggaacctgtggtgatagagaagacaaagagaatatcccagaggatagcagcatggtttccaaaagatttcgtttcgatgactcattacccaatccccatgaacttgtttcagatttgctctgttag

SEQ ID NO: 189 - DNA, 1486 bp, Homo sapiens
ttgcgggaaagagccaaaccctggcgttggggggcccgggcggggagcccctcccgcggtccacagcgacgcctgcccagccctcctccccttccggctccggcacggggccccgaggcgttcggaggccaggcgggtttctgtcaggcccggggaggaggggcgggcggggcggccgctgcctccccgggacgggccgtaccacgcggacggggaggacggggccaggggactgcagggcggctgcaccgcccgggggcggggtgcggagcgggccggcgggctccccggggcggggcgggagggcggggcgtggggcggacggaaccaccggggcggggtgggaggtaacgggacgggcgcgaccatggcgcggtgagggagcgggggtggggatcggtccgggggaggcctgaggccgctggcttgtgcgctgtctccgccgcccccctctttcgccgccgccgccgccgccccgggcatgtcgtccaactgcaccagcaccacggcggtggcggtggcgccgctcagcgccagcaagaccaagaccaagaagaagcatttcgtgtgccagaaagtgaagctattccgggccagcgagccgatcctcagcgtcctgatgtggggggtgaaccacacgatcaatgagctgagcaatgttcctgttcctgtcatgctaatgccagatgacttcaaagcctacagcaagatcaaggtggacaatcatctcttcaataaggagaacctgcccagccgctttaagtttaaggagtattgccccatggtgttccgaaaccttcgggagaggtttggaattgatgatcaggattaccagaattcagtgacgcgcagcgcccccatcaacagtgacagccagggtcggtgtggcacgcgtttcctcaccacctacgaccggcgctttgtcatcaagactgtgtccagcgaggacgtggcggagatgcacaacatcttaaagaaataccaccagtttatagtggagtgtcatggcaacacgcttttgccacagttcctgggcatgtaccgcctgaccgtggatggtgtggaaacctacatggtggttaccaggaacgtgttcagccatcggctcactgtgcatcgcaagtatgacctcaagggttctacggttgccagagaagcgagcgacaaggagaaggccaaggacttgccaacattcaaagacaatgacttcctcaatgaagggcagaagctgcatgtgggagaggagagtaaaaagaacttcctggagaaactgaagcgggacgttgaggagattctcgttctgtccccaggctggagaatcgcttgaacccaggaggcggaggttgcggtgaccctccagcttgggcaacatgttatgaatgaaactccatctcaaaaaataaaaaaaaaaaaaggaagcaaaaaaaaaaaaaaaaaaaaaaaaaaaaaaaaaaaaaaaaaaaaaaaaaaaaaaaaaaaaaaaaaa

SEQ ID NO: 190 - DNA, 1356 bp, Homo sapiens
atggtgggctcagctctcaggagaggtgcccatgcatatgtctacctggtgagtaaggccagtcacatctccagaggccatcagcaccaggcctggggatcgaggcctcctgcagcagagtgtgccacccaaagagctccaggcagtgtggtggagctgctgggcaaatcctaccctcaggacgaccacagcaacctcacccggaaggtcctcaccagagttggcaggaacctgcacaaccagcagcatcaccctctgtggctgatcaaggagagggtgaaggagcacttctacaagcagtatgtgggccgctttgggaccccgttgttctcggtctacgacaacctttctccagtggtcacgacctggcagaactttgacagcctgctcatcccagctgatcaccccagcaggaagaagggggacaactattacctgaatcggactcacatgctgagagcgcacacgtctgcacaccagtgggacttgctgcacgcgggactggatgccttcctggtggtgggtgatgtctacaggcgtgaccagatcgactcccagcactaccctattttccaccagctggaggccgtgcggctcttctccaagcatgagttatttgctggtataaaggatggagaaagcctgcagctctttgaacaaagttctcgctctgcgcataaacaagagacacacaccatggaggccgtgaagcttgtagagtttgatcttaagcaaacgcttaccaggctcatggcacatctttttggagatgagctggagataagatgggtagactgctacttcccttttacacatccttcctttgagatggagatcaactttcatggagaatggctggaagttcttggctgcggggtgatggaacaacaactggtcaattcagctggtgctcaagaccgaatcggctgggcttttggcctaggattagaaaggctagccatgatcctctacgacatccctgatatccgtctcttctggtgtgaggacgagcgcttcctgaagcagttctgtgtatccaacattaatcagaaggtgaagtttcagcctcttagcaaatatccggctgtgatcaatgatatttcattctggttgccctctgagaattacgcagaaaatgatttctatgacttagtccgaacaattggaggagacctggtggaaaaggttgatctcatagacaagtttgtacatccaaagacgcacaagaccagccactgctaccgcatcacgtaccgccacatggaacggactctgtcccagagagaggtcaggcacatccaccaggccttgcaggaggctgcagtccagctgttgggtgtggagggcaggttctga

SEQ ID NO: 191 - DNA, 1482 bp, Homo sapiens
atgtcagtggacatgaatagccaggggtctgacagcaatgaagaggactatgacccaaattgtgaggaagaggaagaagaagaagaagacgaccctggggacatagaggactattacgtgggagtagccagcgatgtggagcagcagggggctgatgcctttgatcccgaggagtaccagttcacttgcttgacctacaaggaatctgagggtgccctcaatgagcacatgaccagcttagcttctgtcctaaaggtatctcattcagttgctaaacttatattagttaatttccactggcaagtttcagagatattggacagatacaagtccaattctgctcaactgcttgttgaggctcgagttcagcctaatccatcaaaacatgttcccacatcccatccccctcaccactgtgcagtgtgtatgcagtttgtgcgaaaggaaaacctactctctctggcctgtcagcaccagttttgccgcagctgctgggagcagcactgctcagttctcgtcaaggacggcgtgggcgtgggagtctcttgcatggctcaggactgtccactccgtacaccagaggactttgtgtttccattgcttcccaatgaagaattgagagagaaatacaggcgctacctcttcagggactatgtggagagtcattaccagctccagctgtgccctggtgcagactgccccatggttattcgggtacaggagcctagagctcgccgagtacagtgcaatcggtgcaacgaggtcttctgtttcaagtgtcgtcagatgtatcacgcacccacagactgtgccacaatccggaaatggctcacgaagtgtgcagacgactctgaaacagccaactacattagtgctcacactaaagactgtcccaagtgcaacatctgcattgagaagaatggaggctgcaatcacatgcaatgctccaaatgtaaacacgacttctgctggatgtgtctaggagattggaagactcatggcagtgaatactatgagtgcagtcgttacaaggagaatcctgacatcgtgaaccagagccaacaagcccaggcgagggaagccctcaagaagtacttattctactttgagaggtgggaaaaccacaataaaagcttgcagctagaggcacagacataccagcggattcacgagaagattcaggagagggtcatgaacaatctggggacatggatcgactggcagtacctacagaatgctgccaagctcttggccaagtgtcgatacaccctgcaatacacctacccatatgcatattacatggagtccggacccaggaagaagctgtttgaataccagcaggctcagctggaggctgagatcgaaaacctctcatggaaagtggagcgtgcagacagctatgacagaggggacttggagaaccagatgcatatagcggagcagcggaggagaaccctgctgaaagatttccatgacacctaa

SEQ ID NO: 192 - DNA, 918 bp, Homo sapiens
atggacgacaaggagttaattgaatactttaagtctcagatgaaagaagatcctgacatggcctcagcagtggctgccatccggacgttgctggagttcttgaagagagataaaggggagacaatccagggtctgagggcgaatctcaccagtgccatagaaaccctgtgtggtgtggactcctctgtggcagtgtcctctggcggggagctcttcctccgcttcatcagtcttgcctccctggaatactccgattactccaaatgtaaaaagatcatgattgagcggggagaactttttctcaggagaatatcactgtcaagaaacaaaattgcagatctgtgccatactttcatcaaagatggagcgacaatattgactcacgcctactccagagtggtcctgagagtcctggaagcagccgtggcggccaagaagcgatttagtgtatacgtcacagagtcacagcctgatttgtcaggtaagaaaatggccaaagccctctgccacctcaacgtccctgtcactgtggtgctagatgctgctgtcggctacatcatggagaaagcagatcttgtcatagttggtgctgaaggagttgttgaaaacggaggaattattaacaagattggaaccaaccagatggctgtgtgtgccaaagcacagaacaaacctttctatgtggttgcagaaagtttcaagtttgtccggctctttccactaaaccagcaagacgtcccagataagtttaagtataaggcagacactctcaaggtcgcgcagactggacaagacctcaaagaggagcatccgtgggtcgactacactgccccttccttaatcactctgctgtttacagacctgggcgtgctgacaccctcagcagtcagcgatgagctcatcaagctctatctgtaa

SEQ ID NO: 193 - DNA, 498 bp, Homo sapiens
atggcggggaccgcgctcaagaggctgatggccgagtacaaacaattaacactgaatcctccggaaggaattgtagcaggccccatgaatgaagagaacttttttgaatgggaggcattgatcatgggcccagaagacacctgctttgagtttggtgtttttcctgccatcctgagtttcccacttgattacccgttaagtcccccaaagatgagatttacctgtgagatgtttcatcccaacatctaccctgatgggagagtctgcatttccatcctccacgcgccaggcgatgaccccatgggctacgagagcagcgcggagcggtggagtcctgtgcagagtgtggagaagatcctgctgtcggtggtgagcatgctggcagagcccaatgacgaaagtggagctaacgtggatgcgtccaaaatgtggcgcgatgaccgggagcagttctataagattgccaagcagatcgtccagaagtctctgggactgtga

SEQ ID NO: 194 - DNA, 3677 bp, Homo sapiens
gctgcgcgcgctggggagcacgtggggggacacgcagggactgcccgcgcgaatggcttccaacgcatgcgccccaccctacatttcacagtcgccatgacgaccaggaggtccgctagtcaacggctcgtcaacggctgcggggacaagtccgttgaggctgccaggcgagtcaggcctttctggacctcgcctgactcggctgggctgtgcctgaaattgacccagctccactaggaattatgaagaaacaaggactccgggaagaggtgcacgaactgcaggcgcggtggttccccagcagaaccactctgcatcggggaattgaaaacaaggaattccccaaccaaacaggggcacaggctgtgtttgcagctcctgtaaaagctccatacccagagccgtgtctcccagctcccagccgtctttgtggcaattctacattggttacatttagtaacactttttgaaaatgatcatcatttctctcacctctcatctttggaacgggagatgactttttgcattgaaacggttaggtttcttcttctaacgaattaatttgtggtttaagaatagccagaccgagaggtgacagcatgctggcagtcctcagagcccttgcttgctctcggcacctcccctgcctgggctcccgctttggtggcatttgaggagcccttcagtcccccactgcactgtgggagcccctttctgggctggccaaggccggagcccactccctcagcttgcagggaggtgtggagggagagacacgagcgggaaccggggctgtgtgctgcacttgcgggccatctggagttccgggtgggcgtgggcttggtgggccccgcactcagagcagccagccagccctgctggccccgggcaatgggggacttagcacctgggccagtggctgcggagggtgtactgagtcccccagcagtgctggcccaccggcgctgcgctcgatttctcgctgggccttggctgccttcccacggggcagggctcgggacctgcagcccgccatgcctgagcctcctacccaatccatgggctcctgtgcggcctgagcctccccgacgagcaccaccccctgctccacggcgcccagtcccatcgaccacgcaagggctgaggaatgcgagcgcccggcacaggactggcaggcagctccacctgcagccccagtgcaggatccactaggtgaagccagctgggctcctgagtctggtggggacgtggagagtctttatatctagctcagggattgtaaatacaccaatcagcaccctgtgtttagctcaaggtttgtgagtgcaccagtcaacactctgtatctagctgctctggtgagggcgtggagagtctttatgtctagctcaaggattgtaaatacaccaatcagcactctgtgtctagctcaaggattgtaaatacaccaatcggcactctgtatctagctcaaggtttgtaaacacaccaatcagcaccctgtgtttagctcaaggtttgtgagtgcaccagtcgacactctgtatctagctgccctgatggggacgtggagaacctttgtatctagctcagggattgtaaacgcaccaatcagcgccctgacgaaacaggccactcggctctaccaatcagcaggatgtaggtggggccagataagagaataaaagcgggctgcccgagccagcattggcaacccgctcgggtccccttccacactgtggaagctttgttctttcgctctttgcaataaatcttgctactgctcactctttgggtccacgctgcttttgtgagctgtaacactcaccatgaagatctgcagcttcactcctgagcccagcgagaccacgagcccaccgggaggaacgaacaactccagacacgccaccttaagagctgtaacactcaccgcgagggtccaccgcttcattcttgaagtcagtgagaccaagaacccaccaattccggacacaagactatgagggactttattattcttacttcaagaccattattgaagcaccttcatttttgggaggactgtggatgattatgaatgacaggcttactgaatatcctcttgtaattaatgcagtaaaacgcttccatatttatccagagaattctggagtccaaggaagaccaagatcaaggcgccagcagatttggtgtctggtgaaggctgctctccgcttccaagatggtgccttgatgttgcatcttcctgaaggagaggaacactgtgtcctcacatggcagacagtaggagagtaatcatagcctcctggtatcgcacattcatgggaatagtgaatttatttggactagaaactaagacctgctggaatgtcaccagaatagaacctcttaatgaagttcaaagctgtgaaggattgcgagatcctgcttgcttttatgttggtgtaatctttattttaaatggactaatgatgggattgttcttcatatatggaacatacctaagtggtactgaactgggaggtcttattacagtactgtgcttctttttcaaccatggagaggccacctgtgtgatgtggacaccacctctccgtgaaagtttttcctatcctttccttgtacttcagatgtatgttttaactttgattctcaggacctcaagcaatgatagaaggcccttcattgcactctgtctttccaatgttgcttttatgcttccctggcaatttgctcagtttatactttttacacagatagcatcattatttcccatgtatgttgtgggatacattgaaccaagcaaatttcagaagatcatttatatgaacatgatttcagttacccttagtttcattttgatgtttggaaattcaatgtacttatcttcttattattcttcatctttgttaatgacatgggcaataattctaaagagaaatgaaattcaaaaactgggagtatctaaactcaactgctggctaattcaaggtagtgcctggtggtgtggaacaatcattttgaaatttctgacatctaaaatcttaggcgtttcagaccatatttgcctgagtgatcttatagcagccggaatcttaaggtatacagattttgatactttaaaatacacctgttctcccgaatttgacttcatggaaaaagcgactctgctgatatacacaaagacattattgcttccagttgttatggtgattacatgttttatctttaaaaagactgttggtgatatttcgcgtgttttagctacaaacgtttatctaagatgctgtctttgcaggtgccatgcctacaatggcaagtgtcaagctgtctacacttcatcccattgtgaatcatccacattacgaagatgcagacttgaggcctggttgcagcatgcttgaaatctgggatgtggaagacccttccaatgcagctaaccctcccttatgtagcgtcctccttgagccgagattgtgccactgcactccagcctgggcgacaaatcaagaccccgtctccaaaaaaaaaaaaaaaaaaacttgattgggatccaaaatcatacaactatacactaaaatcagtgaatattaccttatgtaaattaaaaattaggaaatcaaaagaaaagcatacatataaaaaacagttttttctaagcaaaaaaaaaaaaaaaa

SEQ ID NO: 195 - DNA, 567 bp, Homo sapiens
atgcacagacccagaagacccctccatcctgtagcacctgccatgagcatcgggctcctgtgctgtgtggccttttctctcctgtgggcaagtccagtgaatgctggtgtcactcagaccccaaaattccaggtcctgaagacaggacagagcatgacactgcagtgtgcccaggatatgaaccataactccatgtactggtatcgacaagacccaggcatgggactgaggctgatttattactcagcttctgagggtaccactgacaaaggagaagtccccaatggctacaatgtctccagattaaacaaacgggagttctcgctcaggctggagtcggctgctccctcccagacatctgtgtacttctgtgccagcagtgaagccacagcgctgcatggccgtctcctctctgcacataaaggcagggaggctctgccctcctccctcaccccagactcagtgatgccctgggcagagttctctgcaccaggaaacttgaaaccccatcatcatgggtctgaggcccccaggatgaaacaggatttgtatttcagatccatctag

SEQ ID NO: 196 - DNA, 1293 bp, Homo sapiens
atggccctgctgcactccggccgcgtcctccccgggatcgccgccgccttccacccgggcctcgccgccgcggcctctgccagagccagctcctggtggacccatgtggaaatgggacctccagatcccattctgggagtcactgaagcctttaagagggacaccaatagcaaaaagatgaatctgggagttggtgcctaccgggatgataatggaaagccttacgttctgcctagcgtccgcaaggcagaggcccagattgccgcaaaaaatttggacaaggaatacctgcccattgggggactggctgaattttgcaaggcatctgcagaactagccctgggtgagaacagcgaagtcttgaagagtggccggtttgtcactgtgcagaccatttctggaactggagccttaaggatcggagccagttttctgcaaagattttttaagttcagccgagatgtctttctgcccaaaccaacctggggaaaccacacacccatcttcagggatgctggcatgcagctacaaggttatcggtattatgaccccaagacttgcggttttgacttcacaggcgctgtggaggatatttcaaaaataccagagcagagtgttcttcttctgcatgcctgcgcccacaatcccacgggagtggacccgcgtccggaacagtggaaggaaatagcaacagtggtgaagaaaaggaatctctttgcgttctttgacatggcctaccaaggctttgccagtggtgatggtgataaggatgcctgggctgtgcgccacttcatcgaacagggcattaatgtttgcctctgccaatcatatgccaagaacatgggcttatatggtgagcgtgtaggagccttcactatggtctgcaaagatgcggatgaagccaaaagggtagagtcacagttgaagatcttgatccgtcccatgtattccaaccctcccctcaatggggcccggattgctgctgccattctgaacaccccagatttgcgaaaacaatggctgcaagaagtgaaagtcatggctgaccgcatcattggcatgcggactcaactggtctccaacctcaagaaggagggttccacccacaattggcaacacatcaccgaccaaattggcatgttctgtttcacagggctaaagcctgaacaggtggagcggctgatcaaggagttctccatctacatgacaaaagatggccgcatctctgtggcaggggtcacctccagcaacgtgggctaccttgcccatgccattcaccaggtcaccaagtaa

SEQ ID NO: 197 - DNA, 912 bp, Homo sapiens
atggctacctctcgatatgagccagtggctgaaattggtgtcggtgcctatgggacagtgtacaaggcccgtgatccccacagtggccactttgtggccctcaagagtgtgagagtccccaatggaggaggaggtggaggaggccttcccatcagcacagttcgtgaggtggctttactgaggcgactggaggcttttgagcatcccaatgttgtccggctgatggacgtctgtgccacatcccgaactgaccgggagatcaaggtaaccctggtgtttgagcatgtagaccaggacctaaggacatatctggacaaggcacccccaccaggcttgccagccgaaacgatcaaggatctgatgcgccagtttctaagaggcctagatttccttcatgccaattgcatcgttcaccgagatctgaagccagagaacattctggtgacaagtggtggaacagtcaagctggctgactttggcctggccagaatctacagctaccagatggcacttacacccgtggttgttacactctggtaccgagctcccgaagttcttctgcagtccacatatgcaacacctgtggacatgtggagtgttggctgtatctttgcagagatgtttcgtcgaaagcctctcttctgtggaaactctgaagccgaccagttgggcaaaatctttgacctgattgggctgcctccagaggatgactggcctcgagatgtatccctgccccgtggagcctttccccccagagggccccgcccagtgcagtcggtggtacctgagatggaggagtcgggagcacagctgctgctggaaatgctgacttttaacccacacaagcgaatctctgcctttcgagctctgcagcactcttatctacataaggatgaaggtaatccggagtga

SEQ ID NO: 198 - DNA, 1371 bp, Homo sapiens; identical to SEQ ID NO: 160

SEQ ID NO: 199 - DNA, 819 bp, Homo sapiens
cggttccggaatcccccagaaccgtgagtcctcctgaggaagccgtcgggggcctggccctgttaggcactgtctcccagagtccccctttcccactagccgcctccgcgtagcccgagaccgcgtcaggagttgcgtcttcctggctgcgcctttttcgggactgtcccctgcgccgtccgccgcctctcactgtccccggagcgcgcgccacccgcccgcttcccacaggcggtttcacgcgggtccccggcgccgcgcgcggctccggccctggcgactcttgggacacccgagtagttgcgtgatagcggggctgtcctgaggattcggcgtgccaggttgagagcccgtcgcgtgccggggactcgcggccactgtcgcttcccgtccgcccctcttctcctgggatttggggaggtgggcgggaaagagaactggtcggcggccacccttgccgactcctcctcagcaggtcgcagttgaaaggtcatccttctagagcccactcccctggcccggcgggcaacggataggtctccaagtcccaccctctcacagcgctcggttctgttccactttagaacaggtcgcagttgccactacgtaaacaagctccccatagagagagtatttattcattccgattgctccgtcttttatctagaacagagtctggtacaatggctctcgaaatgtggtctggtgacctcagggtcgcctgagacccttctagggaattcacaaagtcaaaacaccattgataacgttctaacgtgttatttgccagttttaccctcattctgttggcacctgtca

SEQ ID NO: 200 - DNA, 3472 bp, Homo sapiens
tggcggccgccggcgtcgccgccatggacctaggacccttgaacatctgtgaagaaatgactattctgcatggaggcttcttgctggccgagcagctgttccaccctaaggcactggcagaattaacaaagtctgactgggaacgtgttggacggcccatcgtggaggccttaagggagatctcctcggctgcagcacactcccagccctttgcctggaagaagaaagccctgatcatcatctgggccaaggttctgcagccgcaccccgtgaccccgtccgacacagagacacggtggcaggaagacctgttcttctcggtgggcaacatgatccccaccatcaaccacaccatcctcttcgagctgctcaaatccctggaagcttctggactctttatccagctcctgatggccctgcccaccaccatctgccatgcagaactagagcgctttctggaacatgtgaccgttgacacttctgccgaagacgtggccttcttcctggacatctggtgggaggtgatgaagcacaagggtcacccgcaggaccccctgctctcccagtttagtgcaatggcccataagtacctgcctgccttagatgagttcccccatcctccaaagaggcttaggtcagacccagacgcgtgccccaccatgcccctgttggccatgctgctccgcgggctgacacagatccagagtcggatcctgggcccggggaggaagtgctgtgcgctggccaacctggctgacatgctgactgtgtttgcgctgacagaggacgacccccaggaggtgtctgcaaccgtgtatctggacaaactggccacggtgatctctgtgtggaactcggacacccagaatccctaccaccagcaggcgctggcagagaaggtgaaggaggcagaacgggatgtcagcctgacctcgctggccaaactccccagtgagaccattttcgtgggctgcgagttcctgcaccacctgctgcgggagtggggggaggagttgcaggccgtgctccgcagcagccaggggacaagttacgacagctaccggctgtgcgacagtctgacttccttcagccagaacgcgacgctctacctgaaccgcaccagcctgtccaaggaggacaggcaggtggtctctgagctggcggagtgtgtcagggacttcctgaggaaaacgagcacggtgctgaagaacagggccttggaggatatcacagcttccattgccatggccgtcatccagcagaagatggaccgccatatggaagtgtgctacatttttgcctctgagaagaagtgggccttctcggacgagtgggtagcctgcctggggagtaacagggccctcttccgagagccagacttggtgttgaggctgctggaaacagtgatagacgtcagcacagctgacagagccatccctgagtctcagatccggcaggtgatccacctgatcctggaatgttacgcagacctctccctgccaggtaaaaataaagtccttgcaggtatcctgcgttcctgggggcgaaagggcctctctgaaaagttgctggcttatgtggagggttttcaggaagacctcaatacaacttttaaccagctcactcagagtgcctccgaacagggcttggcaaaagctgtggcctccgtggcccgcctggtcatagtgcacccggaagtcacggtgaagaaaatgtgcagcctggctgtggtcaatctcggcacccacaagttcctggcccagattctcactgccttccctgcccttaggtttgtggaagtgcagggtcccaattcatctgccactttcatggtgtcatgcctcaaagaaaccgtctggatgaagttctctacacccaaggaagaaaagcaatttttagagctcctgaactgcctgatgagtcccgtgaaaccccaagggattccagtggctgctcttcttgagccagacgaggtgctgaaggaatttgtcctgcctttcttgaggttagatgttgaagaggtagacctcagtctgaggatcttcatccagactctagaggcaaacgcgtgccgagaggaatactggctccagacctgctccccgtttccactcctcttcagcttgtgccagctcttggaccgctttagcaaatactggccgcttcccaaggagaagcggtgcctctctttggataggaaggatctagcgatccatatcctggagctcctgtgtgagattgtatcagccaatgctgagaccttctccccggatgtctggatcaagtccctgtcctggctccaccgcaagttagaacagctagactggactgtgggcctgaggctgaagagcttcttcgaggggcacttcaagtgtgaagtgccagccacactttttgagatctgtaagctttcagaagacgagtggacctcccaggcccacccagggtacggggctggcacggggctcctggcctggatggagtgctgctgcgtctccagcggcatctcggagaggatgctgtctctcttggtggtggacgtgggcaatcctgaggaggtcagactgttcagcaaaggctttctggtggccctggtgcaagtcatgccttggtgcagccctcaggagtggcagcgccttcaccagctgaccaggagactgctggagaagcagctcctccatgtcccttatagcctggaatatattcagtttgttcccctgctcaacctgaagccctttgcccaggagttgcaactctccgtcctcttcctgaggactttccagtttctctgcagccatagctgtcgtaattggcttcctctggaaggctggaaccacgtggtcaaactcctctgtggcagtctgacccgcctcctggactcagtcagggcgatacaggcagctggcccttgggttcaaggaccagagcaggacctgacccaggaagccctgtttgtttacacccaggtgttctgccatgctctgcacatcatggccatgctccacccggaggtctgtgagccactctacgttttagccttggaaaccctcacctgctatgagactttgagcaagaccaacccttctgtcagctccttgctccagagggcacacgagcagcgcttcttaaagtccattgctgagggcattggccctgaagaacggcgccaaaccctgttgcagaagatgagcagcttctgacttggcgtggggagctgggccccaacatggcgggtctgcagaagatcagcagcttcttacctgtgcgggagcgaaaaagctgggcttcaacatggcaggtctgtaggggtcagacccgagcagcctggactttacagttatgtgaaactgtccacaaaaagtcatggcaataatggtgtaaagaaaatagtttcttgggtatttgtaacgtacaaactatcataaaaattctcctctttcgcatctcaaaaaaaaaaaaaaaaaaaaaaaaa

SEQ ID NO: 201 - DNA, 1935 bp, Homo sapiens
atgaacgctgcggccagcagctaccccatggcctccctgtacgtgggcgacctgcattcggacgtcaccgaggccatgctgtacgaaaagttcagccccgcggggcctgtgctgtccatccgggtctgccgcgatatgatcacccgccgctccctgggctatgcctacgtcaacttccagcagccggccgacgctgagcgggctttggacaccatgaactttgatgtgattaagggaaagccaatccgcatcatgtggtctcagagggatccctctttgagaaaatctggtgtgggaaacgtcttcatcaagaacctggacaaatctatagataacaaggcactttatgatactttttctgcttttggaaacatactgtcctgcaaggtggtgtgtgatgagaacggctctaagggttatgcctttgtccacttcgagacccaagaggctgccgacaaggccatcgagaagatgaatggcatgctcctcaatgaccgcaaagtatttgtgggcagattcaagtctcgcaaagagcgggaagctgagcttggagccaaagccaaggaattcaccaatgtttatatcaaaaactttggggaagaggtggatgatgagagtctgaaagagctattcagtcagtttggtaagaccctaagtgtcaaggtgatgagagatcccaatgggaaatccaaaggctttggctttgtgagttacgaaaaacacgaggatgccaataaggctgtggaagagatgaatggaaaagaaataagtggtaaaatcatatttgtaggccgtgcacaaaagaaagtagaacggcaggcagagttaaaacggaaatttgaacagttgaaacaggagagaattagtcgatatcagggggtgaatctctacattaagaacttggatgacactattgatgatgagaaattaaggaaagaattttctccttttggatcaattaccagtgctaaggtaatgctggaggatggaagaagcaaagggtttggcttcgtctgcttctcatctcctgaagaagcaaccaaagcagtcactgagatgaatggacgcattgtgggctccaagccactatatgttgccctggcccagaggaaggaagagagaaaggctcacctgaccaaccagtatatgcaacgagtggctggaatgagagcacttcctgccaatgccatcttaaatcagttccagcctgcagcgggtggctactttgtgccagcagtcccacaggctcagggaaggcctccatattatacacctaaccagttagcacagatgaggcctaatccacgctggcagcaaggtgggagacctcaaggcttccaaggaatgccaagtgctatacgccagtctgggcctcgtccaactcttcgccatctggctccaactgggtctgagtgcccggaccgcttggctatggactttggtggggctggtgccgcccagcaagggctgactgacagctgccagtctggaggcgttcccacagctgtgcagaacttagcgccacgcgctgctgttgctgctgctgctccccgggctgttgccccctacaaatacgcctccagtgtccgcagccctcatcctgccatacagcctctgcaggcaccccagcctgcggtccatgtgcaggggcaggagccactgactgcctccatgctggctgcagcacccccccaggaacagaagcagatgctgggagaacgcttgttcccactcatccaaacaatgcattcaaatctggctgggaagatcacgggaatgctgctggagatagacaactctgagctgctgcacatgttagagtcccccgagtctctccgctccaaggtggatgaagctgtagcagttctacaggctcatcatgccaagaaagaagctgcccagaaggtgggcgctgttgctgctgctacctcttag

SEQ ID NO: 202 - DNA, 567 bp, Homo sapiens
atgccgaaacgaaagaagcagaatcatcaccagccaccgacacagcagcagcccccgctgcccgagcgggaagagactggagatgaggaggatgggagtcccatcggaccacccagccttctgggccctccccccatggccaatggaaaacctggcgaccctaagtcagctcttcacagaggtcctccaggatcaaggggaccactgattccaccactgctgagtctcccacctcctccttggggtagaggcccaattcggagagggcttggccccaggtctagcccatatggtcgtggttggtggggagtcaatgcagaacctccttttccggggccaggccatgggggtcccaccaggggaagctttcacaaggaacagagaaaccctcgaaggctcaaaagctggtctcttatcaagaatacctgcccgcccaaggatgacccccaggttatggaagacaaatccgaccgccctgtctgccgacattttgccaaaaagggccactgtcgatatgaggacctctgtgccttctaccatccaggcgtcaatggacctcctctgtga

SEQ ID NO: 203 - DNA, 3273 bp, Homo sapiens
ttcagcaaaacaagctatcgatcagggaagatctccagttataatagataacactaatatacaagcttgggaaatgaagccatatgtggaagtggtaaatatgaaacatgagaaagtttttattttttattcttgtcaattttttcacattctaaaattttggctggttggatcttgattattaaaacatttgtcctttgttttctaaagaggtttgttggtttgcttagtttttaaaaaaattgtgaatgatgttttttaaggaacatgttcatcttgttaatttttgtttgtttttttgagacggagtctcgctctgtcacccaggctggagtgcagtggcaccatcttggctcactgcaagctccgcctccccagttgaagcgattctcctgcctcagccacctgagtagctgggattataggtgcctgcccccatgcccagctaatttttgtatttttagtagagacagggtttcaccgtgttggccgggctggtctcgaactcctgagctcagcccatctgccgtgctcagcctcccaaagtgctgggattacaggcatgagccaccacgcccagcctcatattgttttgactttccttaaggatagtaatcttaaggaattactattccttgagaatagtaatcaaaatttatccggttaaatagtcttaactgttataaaccatattattttataaagcgtcatttttcttggtcgagcaagtgtatagtattgtcgaaatgaaatttaactgtctgccttctttttactttaagaagtacttctttgggtttttgttttcttcctttcctttgtgtaggccataggaaaaggatacagagtagagtttcatgaacctgaaacttggtggaaatttgatcctgaagaattagaaaagaggaataaacatggtgtgtctcgaaagaagattgctcagatgttggatcgttatgaatatcaaatgtccatttctattgtaatgaattcagtggaaccatcacacaaaagcacacaaagacctcctcctccacaggggagacagagagaaagagttttgaagaaaactgggcataggctcagcaaaaccaaacagaagaggaacagaaaaagaaacaaaaagcagaacagtcagaatagaatcatggaggaaaactcattagaattcttaagtgatcttacaccgggagatcaggacccatctcagagtgaagaggaagacattgaaaagaccagaagagaatcagaatatcccttcattgatggtctacaaaatgaagtcggagattttgtgactggatataaagaaaaaagatggaaaaataaagatcctaaagacagtttccaaaacgttatgtctatagttgaattagacaacacaccaaagaattacctctctaaggaaggtgataacttgtttgtaagtttgttactgaggccaaatgaaatctccgttacttgtccaatactgactcaaaacctttcctgtgtaacaactgatgactgctctggcatgaaggtagaaaagcatattagaaataggcataccatagcattagacacccaggacctttctgcggaaacttcatgcttatttatgaagaagagagaaatagtagataaaaatctctcacatgaacccattctgtgccatcaacatggaatcagaatgtcagataaagttttaagagaggaacaagtgtatacaactaaaatcaatcactgggcttttttcacaaccaatttatctgatgaagatttacagctgggctctgacagacagccctattttggtagctggcctgcaggacctcataagtttatatgtgaacagagaccaaagaaagatagagcatgtaagttggctggtcctgacagcagggggcaatggattcaaatgatcttcacttcggtggcagcatcagaaccaggaaacaatccagaaatattgacagacaaactactgataggaaatgaagatttttcacctccacctgaaactatggattcattcatagaaacaaacctcttcagaagctgcttacctcaaccggatataccaaagaatgccttagaatcaacaaaaaataagaaaaggaggaagaaaaggattttcaatttggtaccaaattttgacttattaggacagagtcgtatcggtgtaaaagaaagggagaaatgtgacctgttaacaaaaaaccatggactaaaaattactttgggagaagaaaaagatagaatttcagaaaggaacagtgaagaggagaataaacaaaaacttatgacctttgatcatcatccattgtggttttaccttgatattatcaaagctacccctttaaatattgatggacagcgttattctcattgcctgtcatttaacagactaaggtgctctgcatctttatacaaaaattatattccttcttttgtgctacataatttatctagtatttggaagccatcttttacaaacaagaaactgtttttgactttcgaatctcagacaagagtaggtaataaactaaatgatgcagggtttatttctccagaaattttacatagtcatcctgatacttcgtgctctttgggagtcacttctgattttcactttttaaatgaaaggtttgatagaaagctgaaaagatgggaagaacctaaggaattaccagctgaggacagccaagacttaacaagcactgactaccgttcccttgagctaccattatcacaagggtttgcctttcaattagtaaagctttttggatctccaggcgttccaatggaatccttgttgcctgatgactatgtggttccccttgactggaagacactaaagatgatctacttgcaatggaagatgtcagtggagaaaagacagaagaagattggttgaaaaatgaaaattccttgaactttgagttctgctgtcttcatggtactgctgaagatcatgatcacggagaaaagtcagagtgctcagtgccaacccaagggattctttccagagacgtacccgttggataccaaaattagtttggataatctgttcaaccattatatagcctcgatgatgagagagttacaaagaacaaaactccagacacaaacctccaaatttttcagcagaagcactctgcgtcgctgagctgaggtcggctctgcgatccatacgtggccgcacccacacagcacgtgctgtgacgatggctgaacggaaagtgtacactgttcctgaatattgaaataaaacaataaacttttaatggt

SEQ ID NO: 204 - DNA, 3234 bp, Homo sapiens
atggcccgcctcttcagcccccggccgccccccagcgaagacctcttctacgagacctactacagcctgagccagcagtacccgctgctgctgctgctgctggggatcgtgctctgtgcgctcgcggcgctgctcgcagtggcctgggccagcggcagggagctgacctcagacccgagcttcctgaccactgtgctgtgcgcgctgggcggcttctcgctgctgctgggcctcgcttcccgggagcagcgactgcagcgctggacgcgtcccctgtccggcttggtatgggtcgcgctgctagcgctaggccacgccttcctgttcaccgggggcgtggtgagcgcctgggaccaggtgtcctattttctcttcgtcatcttcacggcgtatgccatgctgcccttgggcatgcgggacgccgccgtcgcgggcctcgcctcctcactctcgcatctgctggtcctcgggctgtatcttgggccacagccggactcacggcctgcactgctgccgcagttggcagcaaacgcagtgctgttcctgtgcgggaacgtggcaggagtgtaccacaaggcgctgatggagcgcgccctgcgggccacgttccgggaggcactcagctccctgcactcacgccggcggctggacaccgagaagaagcaccaggaacaccttctcttgtccatccttcctgcctacctggcccgagagatgaaggcagagatcatggcacggctgcaggcaggacaggggtcacggccagagagcactaacaatttccacagcctctatgtcaagaggcaccagggagtcagcgtgctgtatgctgacatcgtgggcttcacgcggctggccagcgagtgttcccctaaggagctggtgctcatgctcaatgagctctttggcaagttcgaccagattgccaaggagcatgaatgcatgcggatcaagatcctgggggactgttactactgtgtctctgggctgccactctcactgccagaccatgccatcaactgcgtgcgcatgggcctggacatgtgccgggccatcaggaaactgcgggcagccactggcgtggacatcaacatgcgtgtgggcgtgcactcaggcagcgtactgtgtggagtcatcgggctgcagaagtggcagtacgacgtttggtcacatgatgtcacactggctaaccacatggaggcaggcggtgtaccagggcgagtgcacatcacaggggctaccctggccctgctggcaggggcttatgctgtggaggacgcaggcatggagcatcgggacccctaccttcgggagctaggggagcctacctatctggtcatcgatccacgggcagaggaggaggatgagaagggcactgcaggaggcttgctgtcctcgcttgagggcctcaagatgcgtccatcactgctgatgacccgttacctggagtcctggggcgcagccaagccttttgcccacctgagccacggagacagccctgtgtccacctccacccctctcccggagaagaccctggcttccttcagcacccagtggagcctggatcggagccgtaccccccggggactagatgatgaactggacaccggggatgccaagttcttccaggtcattgagcagctcaactcgcagaaacagtggaagcagtcgaaggacttcaacccactgacactgtacttcagagagaaggagatggagaaagagtaccgactctctgcaatccccgccttcaaatactatgaagcctgcaccttcctggtttttctctccaacttcatcatccagatgctagtgacaaacaggcccccagctctggccatcacgtatagcatcaccttcctcctcttcctcctcatcctttttgtctgcttctcagaggacctgatgaggtgtgtcctgaaaggccccaagatgctgcactggctgcctgcactgtctggcctggtggccacacgaccaggactgagaatagccttgggcaccgccaccatcctccttgtctttgccatggccattaccagcctgttcttcttcccaacatcatcagactgccctttccaagctcccaatgtgtcctccatgatttccaacctctcctgggagctccctgggtctctgcctctcatcagtgtcccatactccatgcactgctgcacgctgggcttcctctcctgctccctctttctgcacatgagcttcgagctgaagctgctgctgctcctgctgtggctggcggcatcctgctccctcttcctgcactcccatgcctggctgtcggaatgcctcatcgtccgcctctatctgggccccttggactccaggcccggagtgctgaaggagcccaaactgatgggtgctatctccttcttcatcttcttcttcaccctccttgtcctggctcgccagaatgagtactactgccgcctggacttcctgtggaagaagaagctgaggcaggagagggaggagacagagacgatggagaacctgactcggctgctcttggagaacgtgctccctgcacacgtggccccccagttcattggccagaaccggcgcaacgaggatctctaccaccagtcctatgaatgcgtttgtgtcctcttcgcctcagtcccagacttcaaggagttctactctgaatccaacatcaatcatgagggcctagagtgtctgaggctgctcaatgagataattgctgattttgatgagctgctctccaagcccaagttcagtggggtggagaagatcaagaccatcggcagcacctacatggcagccacaggcttaaatgccacctctggacaggatgcacaacaggatgctgaacggagctgcagccaccttggcactatggtggaatttgccgtggccctggggtctaagctggacgtcatcaacaagcattcattcaacaacttccgcctgcgagtggggttgaaccatggacccgtagtagctggagttattggggcccagaagccgcaatatgacatttggggcaacacagtgaacgtggccagccgcatggagagtacaggagtccttggcaaaatccaagtgactgaggagacagcatgggccctacagtccctgggctacacctgctacagccggggtgtcatcaaggtgaaaggcaaagggcagctctgcacctacttcctgaacacagacttgacacgaactggacctccttcagctaccctaggctga

SEQ ID NO: 205 - DNA, 1722 bp, Homo sapiens
atgtccgctttctgcctgggcttggtcggccgcgcttcagcacccgccgagccggacagcgcctgctgcatggagctgcccgccgcggccggggacgcagtccggagtcccgccgccgccgccgccctcatcttccccgggggctccggggagctagaactggcgttagaggaggagctggcgctgctggcggccggggagcggccgtccgaccccggggaacaccctcaggccgagcctgggtctctggccgagggggccggaccgcagccgccgccctcccaggaccccgagctgctgtcggtgatccgacagaaggagaaggatctggtgttggcggcccggctgggtaaggcgctgctcgagaggaaccaggacatgagccggcagtacgagcagatgcataaggagctgacagacaagctcgagcacttagagcaagagaaacatgaattgagaagacgatttgagaaccgagaaggggagtgggaaggccgagtgtcagagctggagagtgatgtgaagcagctacaggatgagttggagaggcagcagattcatctgcgggaagcagatcgagaaaaatcacgggctgtccaggaactgtcggaacagaaccaaaggctattggatcagctcagcagggcatcagaagttgagagacaactctccatgcaggtccacgccctcagagaagactttcgggagaaaaactcatcaaccaaccagcacattatccggctggagagccttcaggccgagatcaagatgctgtcagatcggaaacgggagctggagcatcgtctcagcgctactttagaggaaaatgacctgctccaagggaccgtggaggagctacaggaccgggtgctaatcctggagaggcagggccatgacaaggacctacagctgcaccaaagccagctggagcttcaggaggtgcgtctctcctgccgacagctgcaggtgaaggtggaagaactcactgaggagaggagtctgcagagctctgccgccaccagcacatccctcctgtcagagatcgagcagagcatggaggctgaggagctggagcaggagcgagagcagctgagactgcagctctgggaagcctactgccaggttcgctatctgtgctcacaccttcgaggcaatgacagtgctgactcagccgtctccacggactcctccatggacgagtcttcagaaacctcgtccgccaaggatgtgccagccggcagcttgcgcactgccctcaatgagctcaagagactgatacagagcattgtggatggcatggagcccacggtgacactgctgagtgtggagatgactgccctaaaagaggagagagaccgactcagagtcacttctgaggacaaggagccaaaggagcagcttcagaaggccatcagggaccgcgacgaggccattgcaaagaagaatgctgtggagctggaacttgccaagtgcaggatggatatgatgtctctgaacagccagttgctggatgccattcagcagaaactgaacctctcgcagcagctggaagcttggcaggatgacatgcacagggtcattgaccggcagctgatggacacgcacctgaaagaacggagccagccggctgctgccctctgcaggggccacagcgctgggcggggggatgagcccagcatcgctgaaggcaaacgactcttctcattcttcaggaaaatttaa

SEQ ID NO: 206 - DNA, 193 bp, Homo sapiens
tttataggtctaatgggtcataggttctttatttgtattatgaaggggatagacttgaattagtgtttctaaacctcttgttcatttaagtccccatcacagaccccgtcaccttcatttctttgtggttgagaatcactctcttctgtgtatccacagcagtgctcttcaaaagttgtaaagtcattgaaaa

SEQ ID NO: 207 - DNA, 1710 bp, Homo sapiens
atggagaaaaaatggaaatactgtgctgtctattacatcatccagatacattttgtcaagggagtttgggaaaaaacagtcaacacagaagaaaatgtttatgctacacttggctctgatgtcaacctgacctgccaaacacagacagtaggcttcttcgtgcagatgcaatggtccaaggtcaccaataagatagacctgattgctgtctatcatccccaatacggcttctactgtgcctatgggagaccctgtgagtcacttgtgactttcacagaaactcctgagaatgggtcaaaatggactctgcacttaaggaatatgtcttgttcagtcagtggaaggtacgagtgtatgcttgttctgtatccagagggcattcagactaaaatctacaaccttctcattcagacacacgttacagcagatgaatggaacagcaaccatacgatagaaatagagataaatcagactctggaaataccatgctttcaaaatagctcctcaaaaatttcatctgagttcacctatgcatggtcggtggaggataatggaactcaggaaacacttatctcccaaaatcacctcatcagcaattccacattacttaaagatagagtcaagcttggtacagactacagactccacctctctccagtccaaatcttcgatgatgggcggaagttctcttgccacattagagtcggtcctaacaaaatcttgaggagctccaccacagtcaaggtttttgctaaaccagaaatccctgtgattgtggaaaataactccacggatgtcttggtagagagaagatttacctgcttactaaagaatgtatttcccaaagcaaatatcacatggtttatagatggaagttttcttcatgatgaaaaagaaggaatatatattactaatgaagagagaaaaggcaaagatggatttttggaactgaagtctgttttaacaagggtacatagtaataaaccagcccaatcagacaacttgaccatttggtgtatggctctgtctccagtcccaggaaataaagtgtggaacatctcatcagaaaagatcacttttctcttaggttctgaaatttcctcaacagaccctccactgagtgttacagaatctacccttgacacccaaccttctccagccagcagtgtatctcctgcaagatatccagctacatcttcagtgacccttgtagatgtgagtgccttgaggccaaacaccactcctcaacccagcaattccagtatgactacccgaggcttcaactatccctggacctccagtgggacagataccaaaaaatcagtttcacggatacctagtgaaacatacagttcatccccgtcaggtgcaggctcaacacttcatgacaatgtctttaccagcacagccagagcattttcagaagtccccacaactgccaatggatctacgaaaactaatcacgtccatatcactggtattgtggtcaataagcccaaagatggaatgtcctggccagtgattgtagcagctttactcttttgctgcatgatattgtttggtcttggagtgagaaaatggtgtcagtaccaaaaagaaataatggaaagacctccacctttcaagccaccaccacctcccatcaagtacacttgcattcaagagcccaacgaaagtgatctgccttatcatgagatggagaccctctag

SEQ ID NO: 208 - DNA, 753 bp, Homo sapiens
atggttgctgggagcgacgcggggcgggccctgggggtcctcagcgtggtctgcctgctgcactgctttggtttcatcagctgtttttcccaacaaatatatggtgttgtgtatgggaatgtaactttccatgtaccaagcaatgtgcctttaaaagaggtcctatggaaaaaacaaaaggataaagttgcagaactggaaaattctgaattcagagctttctcatcttttaaaaatagggtttatttagacactgtgtcaggtagcctcactatctacaacttaacatcatcagatgaagatgagtatgaaatggaatcgccaaatattactgataccatgaagttctttctttatgtgcttgagtctcttccatctcccacactaacttgtgcattgactaatggaagcattgaagtccaatgcatgataccagagcattacaacagccatcgaggacttataatgtactcatgggattgtcctatggagcaatgtaaacgtaactcaaccagtatatattttaagatggaaaatgatcttccacaaaaaatacagtgtactcttagcaatccattatttaatacaacatcatcaatcattttgacaacctgtatcccaagcagcggtcattcaagacacagatatgcacttatacccataccattagcagtaattacaacatgtattgtgctgtatatgaatggtattctgaaatgtgacagaaaaccagacagaaccaactccaattga

SEQ ID NO: 209 - DNA, 732 bp, Homo sapiens
atggcagcctccagcatcagttcaccatggggaaagcatgtgttcaaagccattctgatggtcctagtggcccttatcctcctccactcagcattggcccagtcccgtcgagactttgcaccaccaggccaacagaagagagaagccccagttgatgtcttgacccagataggtcgatctgtgcgagggacactggatgcctggattgggccagagaccatgcacctggtgtcagagtcttcgtcccaagtgttgtgggccatctcatcagccatttctgtggccttctttgctctgtctgggatcgccgcacagctgctgaatgccttgggactagctggtgattacctcgcccagggcctgaagctcagccctggccaggtccagaccttcctgctgtggggagcaggggccctggtcgtctactggctgctgtctctgctcctcggcttggtcttggccttgctggggcggatcctgtggggcctgaagcttgtcatcttcctggccggcttcgtggccctgatgaggtcggtgcctgacccttccacccgggccctgctactcctggccttgctgatcctctacgccctgctgagccggctcactggctcccgagcctctggggcccaactcgaggccaaggtgcgagggctggaacgccaggtggaggagctgcgctggcgccagaggcgagcggccaagggggcccgcagtgtggaggaggagtga

SEQ ID NO: 210 - DNA, 1530 bp, Homo sapiens
atgggctgtggctgcagctcacacccggaagatgactggatggaaaacatcgatgtgtgtgagaactgccattatcccatagtcccactggatggcaagggcacgctgctcatccgaaatggctctgaggtgcgggacccactggttacctacgaaggctccaatccgccggcttccccactgcaagacaacctggttatcgctctgcacagctatgagccctctcacgacggagatctgggctttgagaagggggaacagctccgcatcctggagcagagcggcgagtggtggaaggcgcagtccctgaccacgggccaggaaggcttcatccccttcaattttgtggccaaagcgaacagcctggagcccgaaccctggttcttcaagaacctgagccgcaaggacgcggagcggcagctcctggcgcccgggaacactcacggctccttcctcatccgggagagcgagagcaccgcgggatcgttttcactgtcggtccgggacttcgaccagaaccagggagaggtggtgaaacattacaagatccgtaatctggacaacggtggcttctacatctcccctcgaatcacttttcccggcctgcatgaactggtccgccattacaccaatgcttcagatgggctgtgcacacggttgagccgcccctgccagacccagaagccccagaagccgtggtgggaggacgagtgggaggttcccagggagacgctgaagctggtggagcggctgggggctggacagttcggggaggtgtggatggggtactacaacgggcacacgaaggtggcggtgaagagcctgaagcagggcagcatgtccccggacgccttcctggccgaggccaacctcatgaagcagctgcaacaccagcggctggttcggctctacgctgtggtcacccaggagcccatctacatcatcactgaatacatggagaatgggagtctagtggattttctcaagaccccttcaggcatcaagttgaccatcaacaaactcctggacatggcagcccaaattgcagaaggcatggcattcattgaagagcggaattatattcatcgtgaccttcgggctgccaacattctggtgtctgacaccctgagctgcaagattgcagactttggcctagcacgcctcattgaggacaacgagtacacagccagggagggggccaagtttcccattaagtggacagcgccagaagccattaactacgggacattcaccatcaagtcagatgtgtggtcttttgggatcctgctgacggaaattgtcacccacggccgcatcccttacccagggatgaccaacccggaggtgattcagaacctggagcgaggctaccgcatggtgcgccctgacaactgtccagaggagctgtaccaactcatgaggctgtgctggaaggagcgcccagaggaccggcccacctttgactacctgcgcagtgtgctggaggacttcttcacggccacagagggccagtaccagcctcagccttga

SEQ ID NO: 211 - DNA, 542 bp, Homo sapiens
ttaattccaggcctgctggaattaatctgatctgttttgctaaagtttttgcaaggcactgtcctggtcaaggcatgaaacacagtgattaaggaaacatagggattatagtgctgccttgtagccaggggtttgaagagcttgggggtggtttgtatcagcctgtcaccattatttataacaattaaattgattatttgctcctggtcttggtgagaccaactccactaagaacgtcctgctattgaggctagttgtggcaggaatatgcctatgtgacaagcaaagtatgagaaacacctgagatgctatgttggaccctgattccaagatgctgtatacacacatcactggttcttgctctgggtggggatagtgtgtccagccacagcccttacaaaagggaggattgtgggagactgcgcctagttctccagagcctttgctctgaaataccggttggccgggacacatattcttaatttaatgccattgctgtattgaatccttttcttgtaataaacgaggtttgtaagcattgt

SEQ ID NO: 212 - DNA, 475 bp, Homo sapiens
aatgtttatagaagctttatttgtaattgtcaagaaaaattggaaacaacacaaataaggtgggatttgagagactgaagacaatggaaagaccagggagtctatatgagtggagagggaatggtgaagagcttgtccacgaatcgggagaggagttggacgagttgcatggtccctccttctccactttcccctccctgtatgcatttatccctgatgtggaagggagtcaggtgtgctaagccaaggaagagtctgaagaagaaatggaagaaaaaagagaagacaggcaggcaacttccagttccatcaagggggcaaccatggagcaggacagctgctcctaaactcagaggggcagcaggaaaacccctgcattttgcttttaataatatttggattatttaattttttaaaagtcaaagaagttttaaaattctaatgaaatactgaaaagctaattttaaaaagtatt

SEQ ID NO: 213 - DNA, 1566 bp, Homo sapiens
atgctgaacgtcccttcccagtctttcccggcccccaggtcgcagcagcgtgtcgcctccggggggcgtagcaaggtacctttaaaacagggcagaagccttatggattggattcgactgaccaaaagtggaaaggatctaacgggattaaaaggcaggttaattgaagtaactgaagaagaacttaagaaacacaacaaaaaagatgattgttggatatgcataagaggtttcgtttataatgtcagcccttatatggagtatcatcctggtggagaagatgaactaatgagagcagcaggatcagatggtactgaactttttgatcaggttcatcgttgggtcaattatgaatccatgctgaaagaatgcctggttggcagaatggccattaaacctgctgttctgaaagactatcgtgaggaggaaaagaaagtcttaaatggcatgcttcccaagagccaagtgacagatacacttgccaaagaaggtcctagttatccaagctatgattggttccaaacagactctttagtcaccattgccatatatactaaacagaaggatatcaatttagactcaataatagttgatcatcagaatgattcctttagagcagaaacaattattaaggattgtttatatcttatacatattgggctaagccatgaggttcaggaagatttttctgtgcgggttgttgagagtgtgggaaaaatagagattgttctacaaaaaaaagagaatacttcttgggactttcttggccatcccctgaagaatcataattcacttattccaaggaaagatacaggtttgtactacagaaagtgccagttaatttccaaggaagatgttactcatgatacgaggcttttctgtttgatgctgccaccaagcactcatcttcaagtgcccattgggcaacatgtttacctcaagctacctattacaggtacagaaatagtaaagccatatacacctgtatctggttccttactctcagagttcaaggaaccagttcttcccaacaataaatacatctactttttgataaaaatctatcccactggactcttcacaccagagcttgatcgtcttcagattggagattttgtttctgtaagcagtcctgagggcaattttaaaatatccaagttccaagaattagaagatctctttttgttggcagctggaacaggcttcacaccaatggttaaaatactgaattatgctttgactgatatacccagtctcaggaaagtgaagctgatgttcttcaataaaacagaagatgatataatttggagaagccaattggagaaattagcatttaaagataaaagactggatgttgaatttgttctctcagcacctatttctgaatggaatggcaaacagggacatatttcaccagctcttctttctgaatttttgaaaagaaatttggacaaatccaaagttctcgtctgcatttgtggaccagtgccatttacagaacaaggagtaaggttgctgcatgatctcaacttttccaaaaatgagatccatagttttacagcataa

SEQ ID NO: 214 - DNA, 786 bp, Homo sapiens
atggagtcgatgtttagcagccctgccgaggcggcgctgcagcgagagaccggggtgccaggactgcttactcctcttccggacctggacggagtgtacgagctggagcgagtcgctggatttgtccgcgacctggggtgtgaacgagttgccttgcagttccctgaccagctattgggagatgctgtggctgtggctgcacgactggaggagacgacagggtcaaagatgttcattctgggtgacacagcctacggcagctgctgcgtggatgtgctgggtgctgagcaagctggagctcaggctctcatacattttggccctgcctgcttaagccctccagcccgcccactgcccgttgccttcgtgcttcgtcaacgttctgtggccttggagctctgtgtcaaggcctttgaggcccagaacccagaccccaaagcgcctgtggtgctgctgagtgagccggcctgtgcccatgccctgggctctcccttccacgtggctctcccaccacctgagtcagagctgtgggaaaccccagacgtgtcactcattactggagatctccgacccccacctgcctggaagtcatcaaatgatcatggaagcttggctctgaccccacggccccagctggagctggctgagagcagtcctgcagcctcattccttagttcccggagctggcaagggctggagccccgcctgggtcagacgccagtgacagaagctgtgagtggaagacgagggattgccatcgcctatgaggatgagggaagcggctga

SEQ ID NO: 215 - DNA, 2337 bp, Homo sapiens
atggctcagaaaatggactgtggtgcgggcctcctcggcttccaggctgaggcctccgtagaagacagcgccttgcttatgcagaccttgatggaggccatccagatctcagaggctccacctactaaccaggccaccgcagctgctagtccccagagttcacagcccccaactgccaatgagatggctgacattcaggtttcagcagctgccgctaggcctaagtcagcctttaaagtccagaatgccaccacaaaaggcccaaatggtgtctatgatttctctcaggctcataatgccaaggatgtgcccaacacgcagcccaaggcagcctttaagtcccaaaatgctaccccaaagggtccaaatgctgcctatgatttttcccaggcagcaaccactggtgagttagctgctaacaagtctgagatggccttcaaggcccagaatgccactactaaagtgggcccaaatgccacctacaatttctctcagtctctcaatgccaatgacctggccaacagcaggcctaagacccctttcaaggcttggaatgataccactaaggccccaacagctgatacccagacccagaatgtaaatcaggccaaaatggccacttcccaggctgacatagagaccgacccaggtatctctgaacctgacggtgcaactgcacagacatcagcagatggttcccaggctcagaatctggagtcccggacaataattcggggcaagaggacccgcaagattaataacttgaatgttgaagagaacagcagtggggatcagaggcgggccccactggctgcagggacctggaggtctgcaccagttccagtgaccactcagaacccacctggcgcaccccccaatgtgctctggcagacgccattggcttggcagaacccctcaggctggcaaaaccagacagccaggcagaccccaccagcacgtcagagccctccagctaggcagaccccaccagcctggcagaacccagtcgcttggcagaacccagtgatttggccaaacccagtaatctggcagaacccagtgatctggccaaaccccattgtctggcccggccctgttgtctggccgaatccactggcctggcagaatccacctggatggcagactccacctggatggcagaccccaccgggctggcagggtcctccagactggcaaggtcctcctgactggccgctaccacccgactggccactgccacctgattggccacttcccactgactggccactaccacctgactggatccccgctgattggccaattccacctgactggcagaacctgcgcccctcgcctaacctgcgcccttctcccaactcgcgtgcctcacagaacccaggtgctgcacagccccgagatgtggcccttcttcaggaaagagcaaataagttggtcaagtacttgatgcttaaggactacacaaaggtgcccatcaagcgctcagaaatgctgagagatatcatccgtgaatacactgatgtttatccagaaatcattgaacgtgcatgctttgtcctagagaagaaatttgggattcaactgaaagaaattgacaaagaagaacacctgtatattctcatcagtacccccgagtccctggctggcatactgggaacgaccaaagacacacccaagctcggtctcctcttggtgattctgggtgtcatcttcatgaatggcaaccgtgccagtgaggctgtcctctgggaggcactacgcaagatgggactgcgtcctggggtgagacatcccctccttggagatctaaggaaacttctcacctatgagtttgtaaagcagaaatacctggactacagacgagtgcccaacagcaaccccccggagtatgagttcctctggggcctccgttcctaccatgagactagcaagatgaaagtgctgagattcattgcagaggttcagaaaagagaccctcgtgactggactgcacagttcatggaggctgcagatgaggccttggatgctctggatgctgctgcagctgaggccgaagcccgggctgaagcaagaacccgcatgggaattggagatgaggctgtgtctgggccctggagctgggatgacattgagtttgagctgctgacctgggatgaggaaggagattttggagatccctggtccagaattccatttaccttctgggccagataccaccagaatgcccgctccagattccctcagacctttgccggtcccattattggtcctggtggtacagccagtgccaacttcgctgccaactttggtgccattggtttcttctgggttgagtga

SEQ ID NO: 216 - DNA, 2409 bp, Homo sapiens
atgctgggcgcgcgggcctggttgggccgcgtccttctgctgccccgcgccggtgcaggcctcgccgcgagccgcaggtgtcctggagtctggcccaggacctggccccacaggagtcccagcaggggtagctcctcccgggacaaggaccgaagtgcgacggtcagtagttcagtgcccatgcctgctggagggaaaggaagccatccttcatctacaccccagagggtccccaaccgcctgatccacgagaagtcaccatacctcctacaacatgcctacaatcctgtggactggtacccctggggacaggaagccttcgacaaggccaggaaggaaaacaagccgattttcctctcagtcgggtactccacctgccactggtgccacatgatggaagaggagtccttccagaatgaggagattggccgcctgctcagtgaggactttgtgagtgtgaaggtagaccgtgaggagcggcctgacgtggacaaggtgtacatgacgttcgtgcaggccaccagcagcggcgggggctggcccatgaatgtgtggctgactcccaacctccagccctttgtcgggggcacctatttccctcctgaggatggcttgacccgagtcggcttccgcacagtgttgctgagaatacgagaacagtggaaacagaacaagaacaccctgctagaaaatagccagcgtgtcaccactgccctgctggcccgatcagagatcagcgtgggtgaccgccagctgccgccctctgccgccaccgtgaacaatcgctgcttccagcagctggatgagggctatgatgaggaatacggtggcttcgctgaggcccccaagtttcccacgccggtgatcctgagcttcctgttctcctactggctcagccatcgactgactcaggatggctctcgggcccagcagatggccttgcataccctgaaaatgatggctaacgggggcatccgggaccatgtggggcagggctttcaccgctactccacagaccgccagtggcacgtccctcactttgagaagatgctctatgaccaggcacagctcgctgtggcctattcgcaggccttccagctctctggtgatgaattctactctgacgtggccaaaggcatcctgcagtacgtggctcggagcctgagccaccggtccggaggcttctatagcgcagaagatgcagactcgcccccagagcggggccagcggcccaaagagggcgcctactatgtgtggacggtcaaagaggttcagcagctcctcccggagcctgtgttgggtgccaccgagccgctgacctcaggccagctcctcatgaagcactacggcctcacagaggctggtaacatcagccccagtcaggaccccaagggggagctgcagggccagaatgtgctgaccgtccggtactcgctggagctgactgctgcccgctttggcttggatgtggaggccgtgcggaccttgctcaattcagggctggagaagctcttccaggcccggaagcatcggcccaagccgcacctggacagcaagatgctggctgcctggaatggcttgatggtgtcaggctatgctgtgactggggctgtcctgggccaagacaggctgatcaactatgccaccaatggtgccaagttcctgaagcggcacatgtttgatgtggccagtggccgcctgatgcggacctgctacaccggccctggggggactgtggagcacagcaacccaccctgctggggcttcctggaggactacgccttcgtggtgcggggcctgctggacctgtatgaggcctcacaggagagtgcgtggctcgagtgggctctgcggctgcaggacacacaggacaagctcttttgggactcccagggtggcggctacttctgcagtgaggctgagctgggggctggcctgcccctgcgtctgaaggacgaccaggatggagcagagcccagcgccaattccgtgtcagcccacaacctgctccggctgcatggcttcacgggccacaaggactggatggacaagtgtgtgtgcctattgaccgccttttccgagcgcatgcgtcgtgtcccggtggcgttgcccgagatggtccgcgccctctcagcccagcagcagaccctcaagcagatcgtgatctgtggagaccgtcaggccaaggacaccaaggccctggtgcagtgcgtccactctgtctacattcctaacaaggtgctgattctggctgatggggacccctcgagcttcctgtcccgccagctgcctttcctgagtaccctccgacggttggaagaccaggccactgcatatgtgtgtgagaatcaagcctgctcagtgcccatcactgatccctgcgaattacgaaaactactacatccatga

SEQ ID NO: 217 - DNA, 1971 bp, Homo sapiens
atggcgtccacggattacagtacctatagccaagctgcagcgcagcagggctacagtgcttacaccgcccagcccactcaaggatatgcacagaccacccaggcatatgggcaacaaagctatggaacctatggacagcccactgatgtcagctatacccaggctcagaccactgcaacctatgggcagaccgcctatgcaacttcttatggacagcctcccactggttatactactccaactgccccccaggcatacagccagcctgtccaggggtatggcactggtgcttatgataccaccactgctacagtcaccaccacccaggcctcctatgcagctcagtctgcatatggcactcagcctgcttatccagcctatgggcagcagccagcagccactgcacctacaagaccgcaggatggaaacaagcccactgagactagtcaacctcaatctagcacagggggttacaaccagcccagcctaggatatggacagagtaactacagttatccccaggtacctgggagctaccccatgcagccagtcactgcacctccatcctaccctcctaccagctattcctctacacagccgactagttatgatcagagcagttactctcagcagaacacctatgggcaaccgagcagctatggacagcagagtagctatggtcaacaaagcagctatgggcagcagcctcccactagttacccaccccaaactggatcctacagccaagctccaagtcaatatagccaacagagcagcagctacgggcagcagagttcattccgacaggaccaccccagtagcatgggtgtttatgggcaggagtctggaggattttccggaccaggagagaaccggagcatgagtggccctgataaccggggcaggggaagagggggatttgatcgtggaggcatgagcagaggtgggcggggaggaggacgcggtggaatgggcagcgctggagagcgaggtggcttcaataagcctggtggacccatggatgaaggaccagatcttgatctaggcccacctgtagatccagatgaagactctgacaacagtgcaatttatgtacaaggattaaatgacagtgtgactctagatgatctggcagacttctttaagcagtgtggggttgttaagatgaacaagagaactgggcaacccatgatccacatctacctggacaaggaaacaggaaagcccaaaggcgatgccacagtgtcctatgaagacccacccactgccaaggctgccgtggaatggtttgatgggaaagattttcaagggagcaaacttaaagtctcccttgctcggaagaagcctccaatgaacagtatgcggggtggtctgccaccccgtgagggcagaggcatgccaccaccactccgtggaggtccaggaggcccaggaggtcctgggggacccatgggtcgcatgggaggccgtggaggagatagaggaggcttccctccaagaggaccccggggttcccgagggaacccctctggaggaggaaacgtccagcaccgagctggagactggcagtgtcccaatccgggttgtggaaaccagaacttcgcctggagaacagagtgcaaccagtgtaaggccccaaagcctgaaggcttcctcccgccaccctttccgcccccgggtggtgatcgtggcagaggtggccctggtggcatgcggggaggaagaggtggcctcatggatcgtggtggtcccggtggaatgttcagaggtggccgtggtggagacagaggtggcttccgtggtggccggggcatggaccgaggtggctttggtggaggaagacgaggtggccctggggggccccctggacctttgatggaacagatgggaggaagaagaggaggacgtggaggacctggaaaaatggataaaggcgagcaccgtcaggagcgcagagatcggccctactag

SEQ ID NO: 218 - DNA, 725 bp, Homo sapiens
gctccgggtgtcccgagagttgtcctgcgccggtgttcccacgtgcggcctgaacctgagcgcataatgttatgaggagatgggagcactagtgattcgcggtatcaggaatttcaacctagagaaccgagcggaacgggaaatcagcaagatgaagccctctgtcgctcccagacacccctctaccaacagcctcctgcgagagcagattagtctctatccagaagttaaaggagagattgctcgtaaagatgaaaagctgctgtcgtttctaaaagatgtgtatgttgattccaaagatcctgtgtcttccttgcaggtaaaagctgctgaaacatgtcaagagccgaaggaattcagattgccgaaagaccatcattttgatatgataaatattaagagcattcccaaaggcaaaatttccattgtagaagcattgacacttctcaataatcataagcttttcccagaaacctggactgctgagaaaataatgcaagaataccagttagaacagaaagatgtgaattctcttcttaaatattttgttacttttgaagtcgaaatcttccctcctgaagacaagaaagcaatacgatcaaaatgaagaaaatcacagaaatttcctatgtgtactcctcatccctcctgctgtatattttctcattttttgcgtaataaattatgttaattaccaaaaaaaaaaaaaaaaaaaaaaaaaaaaa

SEQ ID NO: 219 - DNA, 795 bp, Homo sapiens
atggcaggggaacagaaaccctcaagtaatctcctggagcagtttattttactagccaaaggtaccagtggctcagccctcactgctctcataagccaggtcttagaggctcccggagtgtatgtctttggagaacttctggagctggccaacgtgcaggagcttgcggaaggagctaatgctgcttatttgcagttgttgaacctgtttgcctatgggacatacccagattacatagccaacaaggagagcctgccagaactgagcacagctcagcagaacaagctgaagcatcttaccatcgtgagcttggcatcaagaatgaagtgtatcccctactccgtgttgctgaaagacctggagatgcggaatctccgggaactagaagaccttatcattgaggctgtctacactgacatcatccagggcaagctggaccagcgaaaccagctgctggaagtggatttctgcattggccgtgacatccgaaagaaggatatcaataatattgtcaagaccctgcatgaatggtgtgatggctgtgaagcagttctactgggcatcgagcagcaagttctgagagccaaccagtacaaagagaaccacaaccgaactcagcagcaggtagaagcagaggttaccaacatcaagaagacactcaaagccaccgcatcctcctcggctcaggagatggagcagcagctggctgaacgggagtgtccccctcacgctgagcagaggcagcccaccaagaagatgtccaaagtgaaaggtctggtctccagccgccactag

SEQ ID NO: 220 - DNA, 2034 bp, Homo sapiens
atgaaggtgttgggaagaagcttcttctgggtgctgtttcccgtccttccctgggcggtgcaggctgtggagcacgaggaggtggcgcagcgtgtgatcaaactgcaccgcgggcgaggggtggctgccatgcagagccggcagtgggtccgggacagctgcaggaagctctcagggcttctccgccagaagaatgcagttctgaacaaactgaaaactgcaattggagcagtggagaaagacgtgggcctgtcggatgaagagaaactgtttcaggtgcacacgtttgaaattttccagaaagagctgaatgaaagtgaaaattccgttttccaagctgtctacggactgcagagagccctgcagggggattacaaagatgtcgtgaacatgaaggagagcagccggcagcgcctggaggccctgagagaggctgcaataaaggaagaaacagaatatatggaacttctggcagcagaaaaacatcaagttgaagcccttaaaaatatgcaacatcaaaaccaaagtttatccatgcttgacgagattcttgaagatgtaagaaaggcagcggatcgtctggaggaagagatagaggaacatgcttttgacgacaataaatcagtcaagggggtcaattttgaggcagttctgagggtggaggaagaagaggccaattctaagcaaaatataacaaaacgagaagtggaggatgacttgggtcttagcatgctgattgactcccagaacaaccagtatattttgaccaagcccagagattcaaccatcccacgtgcagatcaccactttataaaggacattgttaccataggaatgctgtccttgccttgtggctggctatgtacagccataggattgcctacaatgtttggttatattatttgtggtgtacttctgggaccttcaggactaaatagtattaagtctattgtgcaagtggagacattaggagaatttggggtgttttttactctttttcttgttggcttagaattttctccagaaaagctaagaaaggtgtggaagatttccttacaagggccgtgttacatgacactgttaatgattgcatttggcttgctgtgggggcatctcttgcggatcaaacccacgcagagcgtcttcatttccacgtgtctgtccttgtcaagcacacccctcgtgtccaggttcctcatgggcagtgctcggggtgacaaagaaggcgacattgactacagcaccgtgctcctcggcatgctggtgacgcaggacgtgcagctcgggctcttcatggccgtcatgccgactctcatacaggcgggcgccagtgcatcttctagcattgtcgtggaagttctccgaatcctggttttgattggtcagattcttttttcactagcggcggtttttcttttatgtcttgttataaagaagtatctcattggaccctattatcggaagctgcacatggaaagcaaggggaacaaagaaatcctgatcttgggaatatctgcctttatcttcttaatgttaacggtcacggagctgctggacgtctccatggagctgggctgtttcctggctggagcgctcgtctcctctcagggccccgtggtcaccgaggagatcgccacctccatcgaacccatccgcgacttcctggccatcgttttcttcgcctccatagggctccacgtgttccccacgtttgtggcgtacgagctcacggtgctggtgttcctcaccttgtcagtggtggtgatgaagtttctcctggcggcgctggtcctgtctctcattctgccgaggagcagccagtacatcaagtggatcgtctctgcggggcttgcccaggtcagcgagttttcctttgtcctggggagccgggcgcgaagagcgggcgtcatctctcgggaggtgtacctccttatactgagtgtgaccacgctcagcctcttgctcgccccggtgctgtggagagctgcaatcacgaggtgtgtgcccagaccggagagacggtccagcctctga

SEQ ID NO: 221 - DNA, 3561 bp, Homo sapiens
atgagcaagttaaaagtgataccagaaaaaagccttaccaataattctaggatcgtaggactcctggctcaactggagaagatcaatgctgagccttcagaatcagacactgcccgatatgttacatcaaaaattcttcatctggctcagagtcaagaaaaaacaaggagagaaatgacagccaaaggttctacaggaatggaaattctgctgtcaacattagagaacacaaaagatcttcaaactacacttaatatcttaagcattcttgttgagctggtgtcagctggtggaggtcgaagagtgagtttcttagtcaccaaaggtggttcacaaatattgttgcagttacttatgaatgccagcaaagaatctcccccacatgaggacttaatggtacagattcattctattcttgcaaagattggaccaaaagataaaaaatttggagtaaaggctagaattaatggggctctgaatataaccctgaatttggtcaagcagaatttgcagaatcatcgcttggttctaccttgccttcagcttttacgagtatattctgccaactctgtgaattcagtatccttagggaaaaatggagttgtggaactgatgtttaaaatcattggaccatttagtaagaagaattccagtcttataaaggttgctttagacactcttgctgcattgctaaaatcaaaaacaaatgccaggagagctgtagacagaggatatgtccaagtgcttttaacaatttatgtagattggcaccgccatgataaccggcatagaaacatgctcattcggaaaggaattttacagagtttaaaaagtgttacaaacatcaagttgggaagaaaagcatttattgatgccaatgggatgaaaattctgtataatacttcgcaattgcctgttattcctgtgactggtcctgtggctcagctctacagcttacctcctgaagtggatgacgtagtagatgaaagtgatgacaacgatgatattgatgtagaagctgaaaacgaaactgagaatgaagatgacctagatcaaaattttaagaatgatgatattgaaacagatattaacaaactaaaaccccagcaagaaccgggacgaacaatagaagatctaaaaatgtatgaacaccttttccctgagcttgttgatgattttcaggactatgatttaatctccaaagaaccaaagccttttgtatttgagggaaaagtacgtggtcctattgttgttcctacggcaggcgaggaaacatctgggaattctggcaatttaagaaaagttgtaatgaaggagaacatatcttctaaaggagatgaaggtgaaaagaagtctacctttatggatctagcaaaagaagatattaaagataatgatagaacattacaacagcagccaggtgatcaaaatagaactatttcatcagtccatggtttaaacaatgatattgtaaaggccttggaccgaattacattgcagaatattccttctcaaacagccccaggttttactgcagaaatgaagaaggactgcagtcttcctcttactgtccttacctgtgctaaagcatgtccacacatggctacttgtggaaatgttctgtttgagggaagaacagttcagctagggaagctttgctgcactggagttgaaactgaagatgatgaagatactgagtcaaattcatcggtagaacaagcatcggttgaagtacctgatggaccaacactccatgacccagacctctatattgagattgtgaaaaatacgaagtctgtcccagaatattcagaggtggcttatcccgattattttggtcacattccgcctccattcaaagagcctattttagaaaggccttatggtgtacaaaggacaaaaattgctcaagatattgaaaggctaatacatcagagtgatatcatagatcgtgtggtatatgacttggataacccaaattacaccattccagaagagggagatattttgaaatttaactccaaatttgagtctgggaatctgcgcaaagtaattcaaattagaaaaaatgaatatgatcttattctgaactcagacataaacagcaatcattatcatcagtggttttactttgaagtcagtggaatgcgaccaggtgttgcttacaggtttaacatcattaactgtgaaaagtccaacagtcagtttaattatggtatgcaaccactcatgtattcggttcaggaagcattaaatgccagaccatggtggattcgtatggggactgacatttgttactataaaaatcatttctcaagaagttcagttgctgcaggtgggcaaaagggaaaatcctactatacaattacatttactgtcaattttccacataaagatgatgtttgctactttgcttatcactatccatatacgtattcaactttacagatgcatcttcaaaaattggaatcagcacacaatcctcagcaaatctattttcggaaagatgtgttatgtgaaaccctgtctggaaacagctgccccttggtgactataacagcaatgccagagtctaattattatgaacatatctgccatttcagaaatcgcccttacgttttcttgtctgctcgggtacatcctggagaaactaatgcaagttgggttatgaaaggaacgttggaatatctcatgagcaataaccccactgctcagagcttacgagaatcttatatttttaaaattgtccctatgttaaatccagatggtgtcatcaatggaaatcatcgctgttctttaagtggagaggatttgaataggcagtggcaaagtccaagtccggatttacatcctacaatttaccatgctaaggggctgttgcaatacttggctgcagtgaagcgtttacccttggtttattgtgattatcatggccattcccgaaagaagaatgtatttatgtatggttgcagcatcaaagagacagtgtggcataccaatgataatgcaacttcatgtgatgttgtggaggatacgggatacaggacattgcctaagatactgagccatatcgccccagcattttgcatgagcagctgtagcttcgtagtggaaaaatctaaagaatccacagcacgtgttgtagtttggagggaaataggagtacaaagaagttataccatggagagtactttatgtggctgtgatcagggaaaatacaagggtttacagattggtacccgagaactggaagagatgggagcaaaattttgtgttggtcttttacgtttgaaaagactgacctctccattggagtataatctgccttccagcctgcttgactttgaaaatgatttaattgaatcaagctgcaaagtaactagccctaccacttatgtcttggatgaagatgaacctcgattccttgaagaagttgattacagtgcagaaagtaatgatgagttagatattgagttggctgaaaatgtaggagattatgaaccttctgctcaagaagaagtactttctgactctgaattatcaagaacatacctaccttga

SEQ ID NO: 222 - DNA, 1011 bp, Homo sapiens
atgagggccccgtccatggaccgcgcggccgtggcgagggtgggcgcggtagcgagcgccagcgtgtgcgccctggtggcgggggtggtgctggctcagtacatattcaccttgaagaggaagacggggcggaagaccaagatcatcgagatgatgccagaattccagaaaagttcagttcgaatcaagaaccctacaagagtagaagaaattatctgtggtcttatcaaaggaggagctgccaaacttcagataataacggactttgatatgacactcagtagattttcatataaagggaaaagatgcccaacatgtcataatatcattgacaactgtaagctggttacagatgaatgtagaaaaaagttattgcaactaaaggaaaaatattacgctattgaagttgatcctgttcttactgtagaagagaagtacccttatatggtggaatggtatactaaatcacatggtttgcttgttcagcaagctttaccaaaagctaaacttaaagaaattgtggcagaatctgacgttatgctcaaagaaggatatgagaatttctttgataagctccaacaacatagcatccccgtgttcatattttcggctggaatcggcgatgtactagaggaagttattcgtcaagctggtgtttatcatcccaatgtcaaagttgtgtccaattttatggattttgatgaaactggggtgctcaaaggatttaaaggagaactaattcatgtatttaacaaacatgatggtgccttgaggaatacagaatatttcaatcaactaaaagacaatagtaacataattcttctgggagactcccaaggagacttaagaatggcagatggagtggccaatgttgagcacattctgaaaattggatatctaaatgatagagtggatgagcttttagaaaagtacatggactcttatgatattgttttagtacaagatgaatcattagaagtagccaactctattttacagaagattctataa

SEQ ID NO: 223 - DNA, 501 bp, Homo sapiens
atggcagctaccatgttccgggctacgctgcggggatggagaaccggtgtccagcggggctgcgggctacggctgttgagccagacccagggccctccagattaccccaggtttgtggagtctgtggatgaatatcagtttgtggagcgcctgttaccggctaccaggatcccagatcccccaaagcatgaacattatcctacccctagtggctggcagcctcccagagaccccccacccaacctgccttactttgtacgacgctctcggatgcacaacatccccgtctacaaggacatcacgcatggcaaccggcagatgactgtgatccggaaagtggaaggggacatctgggccctgcagaaagacgtggaagattttctgagcccgctgctggggaagacacctgtcacccaggtcaatgaggtgacaggtaccctacggatcaagggctactttgaccaggagcttaaagcctggctcttggagaaaggcttctga

SEQ ID NO: 224 - DNA, 618 bp, Homo sapiens
atgctacgcgcgctgagccgcctgggcgcggggaccccgtgcaggccccgggcccctctggtgctgccagcgcgcggccgcaagacccgccacgacccgctggccaaatccaagatcgagcgagtgaacatgccgcccgcggtggaccctgcggagttcttcgtgctgatggagcgttaccagcactaccgccagaccgtgcgcgccctcaggatggagttcgtgtccgaggtgcagaggaaggtgcacgaggcccgagccggggttctggcggagcgcaaggccctgaaggacgccgccgagcaccgcgagctgatggcctggaaccaggcggagaaccggcggctgcacgagctgcggatagcgaggctgcggcaggaggagcgggagcaggagcagcggcaggcgttggagcaggcccgcaaggccgaagaggtgcaggcctgggcgcagcgcaaggagcgggaagtgctgcagctgcaggaagaggtgaaaaacttcatcacccgagagaacctggaggcacgggtggaagcagcattggactcccggaagaactacaactgggccatcaccagagaggggctggtggtcaggccacaacgcagggactcctag

SEQ ID NO: 225 - DNA, 420 bp, Homo sapiens
atgcttcccttgtcactgctgaagacggctcagaatcaccccatgttggtggagctgaaaaatggggagacgtacaatggacacctggtgagctgcgacaactggatgaacattaacctgcgagaagtcatctgcacgtccagggacggggacaagttctggcggatgcccgagtgctacatccgcggcagcaccatcaagtacctgcgcatccccgacgagatcatcgacatggtcaaggaggaggtggtggccaagggccgcggccgcggaggcctgcagcagcagaagcagcagaaaggccgcggcatgggcggcgctggccgaggtgtgtttggtggccggggccgaggtgggatcccgggcacaggcagaggccagccagagaagaagcctggcagacaggcgggcaaacagtga

SEQ ID NO: 226 - DNA, 2514 bp, Homo sapiens
gtgataatggccacctcgtggggttgctagggactgaatgagacgatgctcaaagcaggggtaccatgcccggcacattccagcactcaacacctaacccctgctgtcactgtccttgtcattattaccagattcacaagcggagccggctaaggccaaggagctgtcctctgagatccatttgctcccgctgctgggaatgaaaacgtcgctgacaccgggctctgcagagccagtttctgattagatggaggtaacccaagttccaaaaaccacagctgaggagcagcagctgacaagctggttgcatggatgtggaaaactaccgcgttccagccgcctccagacagaaacaggacgcatagccaggtcccacggcagctccaaagagggccttgcacgccaagcggggcaccccccagcctgagggttcaccaaccacgcggaccacgcggaaacctagctgggcttctctctcccctcggggcgccagtgcgggaggcggtttctcccttggaagtggaagtcagatctgcttccaggttcccggtctagggccggtctagggcagctaagcctgcctgctccttcctttccatcctccctggtcaggggagcccaacagcaacgcgagggcacccgaccctctgcctgcacctggagggcgcccgggtccccccaagccacggccaggacgtcgcgtggtggggcagggaaaggggcgccgccgctgctggaaactagccctgtgcgctccgcccgcgctcccctcccggagatgtctcgagcgcctctggcgcgaacaaagcccggccgcccccgagaaacttccgtgcatgaaggtttcctccttgactcggcagcagcggccgccgcagggcacagaggcgggaacgcgcggcgggggaccagggcgtctctctccggagcgctgccgcctcctggactccccgctccagctccaaggaccggcatcgctgccgcagccgggaggccgagaacgcgcggtggcgacgccgccccaggccacgcggcgaggcggttccgaacggactcgggattcgctcctgggcgctgtggggccgagtggagccaagcggccgtttttcagctccgcccttccgaaaggctgccgcagggtcggggccacgtggggcccgcggcagaggggctgggggaacgccacgggcggccctggtgaaggtgcccgccggtctcggcctgacccccaggccctgttctggcacgcgccccacctgcgcgcacagtgagaccggcgccctagcctgggaatccggggaatctccagcccgttgccttttccataaccccgtcttctttttcacactagctctgagggtggaaggcagggaggtgccagccacgttcccttccacagagggaactccctgttggaattcctaccccggcttcctgccgtctgtcctggaacacattgctccaggcctccgagcctcagtttcctcgtttgcaaaatgggggcgataacagagcgtcctcaaaggggataagacggaagaagttggctcatatcagggctcataattgttgccaagtattaacaggtaaccacaatcacactccacaaagcttcccttttagtgtcagtgaaattaatttaaaagaagtttccgaaagtcaagtgtgtgtgtgtgaatcctgagataagtcaggtaaggggggaaatgaccacctcacggccccaggctggtgaggaagtcctagccacggaggcggtgctgcaggacctggcctggtggcatagcgtggcgggcgggttcaccgtggagagacgaaggaggtgctgcggcttgtgagaaaaggcccacaaccccatgcagttatttatgaaatggttttccttcctccagggcttggggctcctgcccactcgtatcaggtcccgggacccccccggtggtgtcctcagggctcccgccgtcccaggccgccctccacttctggaagcagacacgaggccacgagacccactgcttttgggtatctgctttcattcctgacactgccctttaagagaaaaaagtacccacattgttcccagatggagagggtccctcccagagggtgaggcactgccacaggggctcacggccctgccaggagtggaaggtgcacacccagaagtatttctcctgtgaaggaagggggctgagcttcgctgcagacctggcctcaggtgtggatgagcttcgctgcagacctggcctcaggtgcggagtctgcgggagcagcatttccaggcagacctgacagaaggtgcctttgagaggtggtgagctccgtgttacaggaggcttgtgagcacaggtagcccatcttctggtgatgatgctggagaagcaattcaaatgtcagaagcaggactggactctgtttccaaaactcacgtctggattctaccccctgaaaacattatttacacaatgtttttcctttaaacaattcacacatttgattaaaagggtaagttta

SEQ ID NO: 227 - DNA, 522 bp, Homo sapiens
atggcggatactgtgttgtttgagtttcttcacacggagatggtggctgagctgtgggctcacgaccccgaccccggcccgggggtgagcgccgggctccgtggggaggaagcgggggccaccaagggacagaagatgagcctgtcggtcctggagggtatggggttccgtgtgggccaggctctaggcgagaggctgccccgggagacgctggccttcagggaggagctggatgtcctcaagttcttgtgcaaagacctgtgggtggcggtgttccagaagcagatggacagcctgcgcaccaatcaccaggggacctacgtcctgcaagacaacagcttccccctcctcctcccgatggcctctggcctgcagtatctggaggaagcacccaagttcctggccttcacctgcggcctcctgcgcggcgccctctataccctgggcattgagagcgtggtcaccgcctccgtggcagccctgcccgtctgtaagttccaggtggtgattccgaaatcctaa

SEQ ID NO: 228 - DNA, 5231 bp, Homo sapiens
agctgtcgtgcctcgtggtcccgggactgcagtggtgtgcgctctcggcgcgtggcgctaggcatggcgatggatcaagtaaacgcgctgtgcgagcagctggtgaaagcggtgacggtcatgatggaccccaactccacccagcgctaccggctggaagccctcaagttttgtgaggagtttaaagaaaagtgtcctatctgtgtcccctgtggcttgaggttggctgagaaaacacaagttgccatcgtcagacattttggccttcagatcctggaacacgttgtcaagtttcggtggaacggcatgtctcgattggagaaggtgtatctgaagaacagtgtcatggagctgattgcaaatggaacattgaacattttggaagaggagaaccatattaaagatgctctgtctcgaattgtagtggaaatgatcaagcgagagtggccacagcattggcctgacatgctaatagaattggacactctttccaaacaaggggaaacacagacagaattggtgatgtttatccttttgcgactggcagaggatgtagtgacttttcagacacttccccctcaaagaagaagggacatccagcaaacattaacccagaacatggaaaggatcttcagttttctgcttaacacacttcaagaaaatgtaaacaagtatcagcaagtgaagacagatacttctcaggagtcaaaggcgcaagcaaactgtcgagtaggagttgcagcactgaatactctagcaggctatattgactgggtgtctatgagtcacatcactgctgaaaactgtaaactcctggagatactgtgtttgctgttgaatgaacaggaacttcagttgggagccgctgagtgtcttctcattgcagtcagcagaaaaggcaagttggaagaccggaagcccttgatggtcttatttggagatgttgccatgcattatatactctccgccgcacagactgctgatggaggaggtttggtagaaaaacactacgtctttctgaagaggctctgtcaggtgttgtgtgcgctgggcaatcagctgtgtgcattgctgggtgcagattctgatgtagaaacaccatcaaactttggaaaatacctggaatcttttcttgctttcacaacccatccaagtcagtttctacgctcttcaactcagatgacttggggagccctcttcaggcatgaaatcctgtcccgtgatcctttgctattagcaataataccaaaatatcttcgtgcttccatgactaacttggtcaagatgggctttccttctaaaacagacagccctagctgtgaatattctcggtttgattttgatagcgatgaggacttcaatgctttcttcaactcctcccgagcacaacaaggagaggtgatgaggttggcatgtcgtttggatcccaaaactagcttccagatggctggggagtggctaaagtatcaactatcaacttttcttgatgctggttctgtgaattcttgttctgcagttggaactggagaaggaagcctctgttccgtcttctcaccttcattcgtgcagtgggaagccatgactctttttttggaaagtgttatcacccagatgtttcgaacactaaatagagaagaaattcctgttaatgatggaatagagctattgcagatggttctgaactttgataccaaggatcccctcatcctgtcctgcgtccttactaatgtctctgcactctttccatttgtcacctacagaccagagttcctgccccaggtcttctctaagctattttcatctgtcacttttgaaactgttgaagaaagtaaggcccccagaacccgggcagtgaggaatgtgaggaggcatgcttgttcctccatcatcaagatgtgtcgtgactacccccagcttgtgctgcccaattttgacatgctttataaccatgtgaagcaactcctctccaatgagctactcctgacacaaatggagaagtgtgccctcatggaagccctggttctcattagcaaccaatttaagaactacgagcgtcagaaggtgttcctagaggagctgatggcaccagtggccagcatctggctttctcaagacatgcacagagtgctgtcagatgttgatgctttcattgcgtatgtgggtacagatcagaagagctgtgacccaggcctggaggatccgtgtggcttaaaccgtgcacgaatgagcttttgtgtatacagcattctgggtgtggtgaaacgaacttgctggcccactgacctagaagaggccaaagctgggggatttgtggtgggttatacatccagtggaaatccaatcttccgtaacccctgcacagagcagattctgaaacttcttgacaatttgcttgcgcttataagaacccacaatacattatatgcaccagaaatgctagccaaaatggcagagcctttcaccaaggctctggatatgcttgacgcggaaaaatctgctatattaggattacctcaacctctcttggaactcaatgactctcctgtcttcaaaaccgtcttggaaagaatgcagcgtttcttctctaccctctatgaaaactgttttcatatcctagggaaggcaggcccttccatgcagcaagacttctatactgtggaggaccttgctacccagcttctcagctcagcctttgtcaacttgaacaatattcctgactaccgactcagacccatgcttcgtgtctttgtaaagcctctggtgctcttctgtcccccagagcactatgaagccctggtatcccccatcctcggacctcttttcacctacctccatatgaggctttctcagaaatggcaagttatcaaccaaaggagcctgctgtgtggagaagatgaggctgcagatgaaaacccagagtctcaagagatgctggaggagcaactggtgaggatgttaacccgagaagtcatggacctaatcacggtttgctgtgtttcaaagaagggtgctgaccacagtagtgctcccccagcagatggagacgatgaagaaatgatggccacagaggtcaccccctcagctatggcagagcttacagacctgggcaaatgtctgatgaagcatgaggatgtttgtacagcgctattaattacagccttcaattccctggcctggaaagatactctgtcctgccagaggacaacctcacagctctgctggcctctcctcaaacaagtgctgtcagggacactgctcgcagatgcagttacgtggcttttcaccagtgtgctgaaaggcttacagatgcacgggcagcacgacgggtgcatggcttccctggtccatctggccttccagatatatgaggcactgcgccccaggtacctggagataagagctgtaatggagcaaatccctgaaatacagaaggactcactggaccagtttgactgcaagcttttaaacccctccctgcagaaagtggctgacaagcgccgaaaggaccaattcaaacgcctcattgctggttgcattgggaaacccttgggagagcagttccgaaaagaagttcacattaagaatcttccctcacttttcaaaaaaacaaagccaatgctggagacggaggtgctggacaatgatgggggtggcctggccaccatctttgaaccctgaatcaagcttttgggcatccttcctcggcctttcttgtcatctcttctttccctttgtagccgatctctaggcccttcttgcactgccacctcactttccaccactgtcagcctggaaagagatccaggtctggagctggagagaacaggccctgtgcaggaccagaagtaattatactaaagtatcaagaaagggagttagggcttaaactattctgtctagatgtcccagatagttcccattctacttggagatttggcttttccaagaaaagctagagcagagcagcccttctcccacaagccctcccacccccgtgcagccacatacctgtacagaatggtaactaagggtgctgtgcccaaccctgcgactagcaaggctcgcagcaagagcacagccctcaactacttgtgccagagtttctcttggaccactccaactcccactgagcccttttgctgctgggctggcaggaaactttccccactccctaaggggcatgtctgggttaggtgctaagtgctgaagagaacttggtcagttctctcaactttgctttgggcaagaatctggtcacctgatgggatccatggtacaggctactgctaaacttggcacagtatcaagtatagtacctccaaggaccagggctgggaagtctttagtgctaacatcccctttagagttcacacatcttgcccttccatgaatgacccctcagtctggcctccccagcctcaaggtccactcaggcacaagagccacagtaccctagatagtgtcacatgacaccgttgtcatccaaggataatacagaccaactaggctacatctgtgatgagcagctagcaaagccgctggtcttctcctaggactaagtccaggtgccttccacaatctcatggtctttcaggtccctggttacttttctcaaaggccatttccaaaagaatacatgccttcacatcacaacctgtactgtgagtccattctagaggtcactgaaaggccctgtaaagagaggacatggatacgggacctggccctgaggttattactggccgtaaggcagagttaatccatacagaaaccagtgtgtccatgtgctctgcacaaaaacagacctgttgtccatccagtccactgacaagagggtttccccgagagccgaagtggactgaagctacagtttttagctggtgcgggccacaggcagggtcagattgagaagaagcaaagctggggaagcagaagttgggagtcttgtgttgctccctcttcctgtgtggtgctctgggtttctgtggatcgtgaaggcgatctcaagagtgtttccctccaaacctgatagctgcctattcctgtctggttggggctgtggaggatgtagttgtatttattgcattgtaatatttttaacatcctgtgacttcatgctagaaattttctattgtttatagaaactttttgtagaaacattaactctaaagcacatctgcatgtcagtaaaaatctcagtttcgtacagaaaaaaaaaaaaaaaaaaaaaa

SEQ ID NO: 229 - DNA, 1095 bp, Homo sapiens
atggtgaagctgttcatcggaaacctgccccgggaggctacagagcaggagattcgctcactcttcgagcagtatgggaaggtgctggaatgtgacatcattaagaattacggctttgtgcacatagaagacaagacggcagctgaggatgccatacgcaacctgcaccattacaagcttcatggggtgaacatcaacgtggaagccagcaagaataagagcaaaacctcaacaaagttgcatgtgggcaacatcagtcccacctgcaccaataaggagcttcgagccaagtttgaggagtatggtccggtcatcgaatgtgacatcgtgaaagattatgccttcgtacacatggagcgggcagaggatgcagtggaggccatcaggggccttgataacacagagtttcaaggcaaacgaatgcacgtgcagttgtccaccagccggcttaggactgcgcccgggatgggagaccagagcggctgctatcggtgcgggaaagaggggcactggtccaaagagtgtccgatagatcgttcaggccgcgtggcagacttgaccgagcaatataatgagcaatacggagcagtgcgtacgccttacaccatgagctatggggattcattgtattacaacaacgcgtacggagcgctcgatgcctactacaagcgctgccgtgctgcccggtcctatgaggcagtggcagctgcagctgcctccgtgtataattacgcagagcagaccctgtcccagctgccacaagtccagaatacagccatggccagtcacctcacctccacctctctcgatccctacgatagacacctgttgccgacctcaggagctgctgccacagctgctgctgcagcagcagccgctgctgctgttactgcagcttccacttcatattacgggcgggatcggagccccctgcgtcgcgctacagccccagtccccactgttggagagggctacggttacgggcatgagagtgagttgtcccaagcttcagcagccgcgcggaattctctgtacgacatggcccggtatgagcgggagcagtatgccgatcgggcgcggtactcagccttttaa

SEQ ID NO: 230 - DNA, 1545 bp, Homo sapiens
atggccgactacctgattagtgggggcacgtcctacgtgccagacgacggactcacagcacagcagctcttcaactgcggagacggcctcacctacaatgactttctcattctccctgggtacatcgacttcactgcagaccaggtggacctgacttctgctctgaccaagaaaatcactcttaagaccccactggtttcctctcccatggacacagtcacagaggctgggatggccatagcaatggcgcttacaggcggtattggcttcatccaccacaactgtacacctgaattccaggccaatgaagttcggaaagtgaagaaatatgaacagggattcatcacagaccctgtggtcctcagccccaaggatcgcgtgcgggatgtttttgaggccaaggcccggcatggtttctgcggtatcccaatcacagacacaggccggatggggagccgcttggtgggcatcatctcctccagggacattgattttctcaaagaggaggaacatgactgtttcttggaagagataatgacaaagagggaagacttggtggtagcccctgcaggcatcacactgaaggaggcaaatgaaattctgcagcgcagcaagaagggaaagttgcccattgtaaatgaagatgatgagcttgtggccatcattgcccggacagacctgaagaagaatcgggactacccactagcctccaaagatgccaagaaacagctgctgtgtggggcagccattggcactcatgaggatgacaagtataggctggacttgctcgcccaggctggtgtggatgtagtggttttggactcttcccagggaaattccatcttccagatcaatatgatcaagtacatcaaagacaaataccctaatctccaagtcattggaggcaatgtggtcactgctgcccaggccaagaacctcattgatgcaggtgtggatgccctgcgggtgggcatgggaagtggctccatctgcattacgcaggaagtgctggcctgtgggcggccccaagcaacagcagtgtacaaggtgtcagagtatgcacggcgctttggtgttccggtcattgctgatggaggaatccaaaatgtgggtcatattgcgaaagccttggcccttggggcctccacagtcatgatgggctctctcctggctgccaccactgaggcccctggtgaatacttcttttccgatgggatccggctaaagaaatatcgcggtatgggttctctcgatgccatggacaagcacctcagcagccagaacagatatttcagtgaagctgacaaaatcaaagtggcccagggagtgtctggtgctgtgcaggacaaagggtcaatccacaaatttgtcccttacctgattgctggcatccaacactcatgccaggacattggtgccaagagcttgacccaagtccgagccatgatgtactctggggagcttaagtttgagaagagaacgtcctcagcccaggtggaaggtggcgtccatagcctccattcgtatgagaagcggcttttctga

SEQ ID NO: 231 - DNA, 6039 bp, Homo sapiens
atggcgacgcctttggcggtaaattcggctgctagtctatggggtccttacaaagacatttggcataaagtgggaaatgctctttggagaagacaacctgaagctgttcaccttcttgataagattttgaagaaacacaaacctgacttcatctcattgttcaaaaatccgccaaaaaatgttcaacagcatgagaaggttcagaaagccagtacagagggagtcgccattcagggtcaacagggaactcgacttcttcctgaacagctcattaaagaagcctttattctcagtgacctttttgatattggagaattggcagctgttgagcttcttcttgctggagagcatcaacagccacattttcctggccttaccagaggattagtagctgttcttctgtactgggatggaaagcgatgcattgcgaattccttgaaagccttgatacagtctagacggggaaagacatggaccctagaactcagtccagagctggcttccatgacaacacgctttacagatgagctgatggagcaaggattgacttataaagttcttacgctggtgtcacagattgatgtgaataatgagtttgagaaactacagcgagagagaggtttgggcagtgaaaaacatcgcaaagaggtttctgatctcattaaggagtgcaggcagtctcttgcagaaagcctttttgcctgggcttgccagtcacctttaggcaaagaagacactctcctcctcattggacatttggaaagagtgacagttgaggctaatggctcactggatgcagtgaatctggctcttcttatggcgcttctatactgttttgatatcagttttatagagcaaagcacagaggaacgagatgatatgattcatcaacttccactgttgacagaaaaacagtacattgcaacaattcactctcgtcttcaggactcacagctttggaaactgcctgggctccaagccactgttagacttgcctgggcgctggcattgaggggaatatcccagctacctgatgtgacagctctggcagaattcacagaggcagatgaagcaatggcagaactcgcaattgctgacaacgttttcctgttcctcatggaatctgtagtggtatcagaatacttttatcaggaagaattttatattcgcagagtccataatctcatcacagatttccttgcacttatgccaatgaaggtgaaacagctgaggaatcgggcagatgaagatgctcgaatgattcacatgagtatgcagatgggtaatgaaccccccatttcacttagaagggacctggaacacttaatgcttttgattggcgagctatataaaaagaacccttttcatctggagcttgctctagaatattggtgtcccacagagcctcttcagactccgactatcatgggctcttatctaggggtggctcatcagcggccccctcaacgccaggttgtcttgtcaaagtttgttaggcaaatgggtgacctgttgcctccaactatttatattccttatttgaagatgctccagggattggccaatgggcctcagtgtgcccactactgtttcagcctgctcaaagtcaatggtagtagtcatgttgaaaatattcagggagcaggtggcagtcctgtttcctgggaacatttctttcactccttgatgctttaccacgaacaccttcggaaggatcttccaagtgcagatagtgtccagtaccgtcaccttccttcccgtggcatcacccagaaggagcaagatggattgattgcttttttgcagctcacgtctaccatcattacttggagtgaaaatgctcgcttggcactctgtgaacaccctcagtggacccctgttgtggtgattctgggactcctccaatgcagtattccccctgtcctaaaagctgagctactgaagacactcgcagcttttggaaaatctcctgaaattgctgcttccctctggcagtcattggaatacactcagatactgcagaccgtgaggattccaagccaaaggcaagctattggtattgaggttgaactaaatgaaatagaatcccggtgtgaagaatacccattgactcgggccttttgccagcttattagtactctggtggagagctcatttccttctaatttgggtgctggactgcggccccctggctttgacccttatttgcagttccttagagactctgtgtttctacgattccgtacaagagcttaccggagagcagctgaaaagtgggaagttgctgaggtggttttggaggtgttttataaattgctcagagattatgagcctcagcttgaagattttgtagaccagtttgtggaactacaaggagaagaaatcatagcctataagccacctggatttagtctgatgtatcatctgctgaatgagtcaccaatgttggagcttgctctcagtttactggaagaaggagttaagcagcttgacacctatgccccctttcctgggaaaaaacacctggagaaagcagtacagcattgccttgcacttctcaatcttactctgcaaaaggaaaatctttttatggaccttctaagagagagtcaactggctctaatagtctgtcctttagaacagcttttgcagggaattaatcccagaactaagaaggcagataatgtggtaaacattgccagatacctatatcatggcaatactaatccagaattggcttttgaaagtgccaagatcctctgttgtatctcttgcaactctaatattcagataaagttggttggagatttcacacatgaccagagtataagtcagaaactaatggctggatttgtggagtgtttggattgtgaagatgcagaagaatttgtacgtctggaagagggatcagaacttgaaaagaaattagttgcaattcgtcatgaaacaagaatccacatcttgaatcttctcattacctctctggaatgcaatccacccaatcttgctctctacctgttgggctttgaattgaaaaaacctgtcagtactacaaacctacaagatccaggagtgttaggttgccctcggacatgccttcacgccattctaaacatcttggagaaaggaacggaagggagaacaggcccagtggcggtgcgagaatctcctcagctggctgagctatgttaccaggtcatatatcagttatgtgcatgctctgatacatctggtcctactatgaggtacttgagaaccagccaggatttcttattttcccagttgcagtatctaccattttctaacaaagaatatgaaatatctatgctgaaccagatgtcatggcttatgaaaactgcctcaatagagctaagggtaacctctctgaatcgtcagcggtcacatacccagaggctcctacacctcttactggatgacatgccagtgaaaccatactcagatggtgaaggaggaatagaagatgaaaacaggtctgtttctgggttccttcactttgacactgctacaaaagtacgtcgaaaaattctaaatattcttgactcgattgacttcagtcaggagatccctgagcctttgcagttggatttttttgatcgggcccagattgaacaagttattgctaactgtgaacacaagaatttacggggacagacagtctgcaatgtcaagcttcttcatagggttcttgtagctgaagtaaatgcccttcagggtatggcagccataggacagagacctctactaatggaggaaatcagcactgtacttcagtatgtggtaggaagaaataaattgctgcagtgtcttcatgcaaaacgtcatgctctggagtcgtggaggcaactagtagaaattatactgacagcttgtccccaggacctcattcaggcagaggatcgacaactgattattcgtgatattttacaagatgtgcatgataagatactggatgatgaagctgcgcaagagttaatgcctgtggtcgccggggcagtgttcacactgactgctcacctaagccaggccgtcctcactgaacagaaggaaacatcagtcttgggaccagcagaggcccattacgcttttatgcttgatagttgcttcacctcacctcctcctgaagagaacccattagtgggttttgcttctattggagattcttcactttacatcatattgaagaaactgttagacttcattttgaagacaggtggtggattccaacgagtgaggactcacttgtatggctctctgctttattacttacagattgcccagagacctgatgaaccagacaccttagaagcagccaagaaaaccatgtgggaaaggctgacagcccctgaagatgtatttagcaaattacagcgagaaaacatagccattattgaaagttatggcgccgccctcatggaagtggtctgtcgagatgcttgtgatggtcatgagattggaaggatgctggccctggctctacttgatagaattgtctccgtggataaacagcagcagtggcttttgtatctttctaacagtggctacttgaaggtcctcgtagacagcttggtagaagatgaccgtactttgcagagcttactcaccccacagcctccccttttaaaagcactttatacttatgaatctaaaatggcatttctcacaagagtggcaaagatacagcagggtgcattagagctgctaagatcaggggtgattgtgagactagctcaatgccaagtctatgacatgcgcccagaaacggacccgcagagcatgtttggcatgagagaccctccaatgttcatccctaccccagtggatcgctaccgccagattctcctcccagctctccagctgtgccaggtcatcctcacatctagtatggcccagcacttgcaggcagcagggcaggtattgcagtttcttatttcacattctgataccatacaagcaattctgcgctgtcaggatgttagtgctgggtctttgcaggaattggctctgctgacaggaattataagtaaagcagcacttcctggaatattaagtgaacttgacgttgatgtaaatgaagggtctctaatggagctacagggacatattggaagattccagcgccagtgcttaggactactaagtcgctttggtggctctgacagactgcgtcagtttaaatttcaagacgataatgtggagggagataaagtaagcaagaaagatgagattgaactggctatgcagcagatttgtgccaatgtaatggaatattgccagtcactcatgttacagagttcccctaccttccagcatgctgtgtgtctcttcactcctagcctttcagaaacagttaatagagatggaccgcggcaagatacccaagctccagtggttccatactggcgcctgcctggtttaggcattatcatctacctgctgaaacagagtgctaatgatttcttcagctattatgacagtcatcgacagagtgtcagcaagctacaaaatgtagagcagcttcccccagatgagataaaagagttgtgtcagtctgtgatgcctgctggtgttgataaaatctccactgctcagaaatatgttctagcaagacggcgcttggtgaaggtgatcaacaatcgagctaaactgctttccctttgttcttttatcatagagacctgcctatttattctttggcgccatctggagtactacttgttacattgcatgcccacggattctcaagattccttatttgcctcgagaaccttgtttaaaagcagaagactgcaagattccttcgcctcagaaaccaatctagattttagaagtgggctggctatagtgagccaacatgatttagaccagcttcaggctgatgcaatcaacgcttttggagaatcactacaaaagaaacttctggacattgaaggattatattcaaaagttcgatctcgatatagtttcatacaggctcttgtcagacgtatccgtggcctcttgaggatatcaaggaactga

SEQ ID NO: 232 - DNA, 5195 bp, Homo sapiens
ggtgatgctgcagccaagatggcgcccgcggcggccgtggcggcctgagcgtgatgctccgggttctcggcggcggctgtggccttggccggggccttgggtctctcccggtcgtgagcgatcagcgcctctccgccggccgggctagccgggacagagaggagacggccacgaagagaggaggcagtgagcaacaggacgagaccgcggcgtctccagcctcggtaccatggccgggatcatcaagaaacaaatcttgaagcacctctccagatttaccaaaaatttatctcctgacaagataaatctaagtacccttaaaggagaaggtgaactgaagaatttggagttggatgaagaagtactccagaatatgttggatttgccaacatggcttgctatcaacaaagttttttgtaataaagcgtccattaggatcccatggacaaaactgaaaacacatcccatctgtttgtccctggataaagtaataatggaaatgagtacatgtgaagaaccaagaagccctaatggcccatcaccaattgcaactgcttcaggacaaagtgaatacggctttgctgaaaaagtagttgagggaatttctgtttctgtaaattctatagtcatcagaattggagcaaaagccttcaatgcatcatttgaactttctcagcttcggatctatagtgtaaatgcacactgggaacatggagatttgagatttactcgtattcaggatccacagagaggagaggttttgacttttaaagaaataaattggcagatgataagaatagaggcagatgccacccaaagttcacatcttgaaattatgtgtgctcctgttcgattaataaccaaccaatcaaaaatcagagtcacacttaaaagaaggttaaaggactgcaatgtcatagcaacaaagttagttctaatattggatgacttattatgggttttgactgattcccagttgaaagctatggtacaatatgcaaagtctcttagtgaagcaatagaaaaatcaacagaacaaaggaagagtatggctcctgaacctacacagagctctacagtagtcgcatctgcccagcaagtgaagacaacgcaaacttcaaatgctcctgatgtaaatgatgcaattgtgaaactattcaatgattttgatgttaaggaaacctcccatcatttagtgatttctcatctagatctacacatatgtgatgacattcatgctaaagaaaaagagtcaaacagacgtattactggaggggcaatgcaactctcttttacacagctaactatagattattatccttatcataaagcaggagatagttgtaatcattggatgtattttagtgatgcaaccaaaacaaaaaatggatgggccaatgagttattgcatgaatttgagtgcaacgttgaaatgcttaaacaggctgtgaaggatcataatgtaggttcacctcctaaatccccaacacatgcctctccccagcacacacaaacagagaaggactaccctctgaaagggacatgcagaacaccttcagtattatctcaacaatcaaaagctaagctaatgtctagttctgttgtggttagacttgcagatttcaatatataccaggtctctacagcggaacaatgtcgttcttcccccaaaagcatgatttgctgcaataaaaaatccctatatcttccacaagaaatgtcagctgtctatatagaattcacagaatattactatccagatggaaaggattttccaattccatctcccaacctctatagccagctgaatgcactacagtttactgtggatgaaagaagcattctatggttaaatcaatttctgttggatttaaaacagagtcttaatcagttcatggctgtgtacaagttgaatgacaattcaaaatctgacgagcatgttgatgttcgagttgatggcttaatgctaaagtttgtcattccttctgaagtgaaatctgaatgtcatcaagatcagccacgtgcaatttctattcagagttctgaaatgattgccacaaatacaaggcactgtccaaactgtcgacattctgacctagaagctttgtttcaagactttaaagattgtgatttttttagtaaaacatataccagcttccccaaatcttgtgacaattttaatcttctacatccaattttccagagacatgctcatgaacaagataccaaaatgcatgaaatttataaaggaaatattactccccaattgaataaaaacactcttaaaacttctgctgccacggatgtttgggctgtgtacttttctcaattttggatagattatgaagggatgaaaagtggaaaaggacggccaataagttttgtagactcattccctctttccatttggatttgtcaaccaacaagatatgcagagtcacaaaaagagccgcagacttgtaatcaggtatctctaaatacatcacaaagtgaatctagtgatctggctggccgattgaagcggaagaagctcttgaaggagtattatagtacagagtctgagcctttgacaaatggtggtcagaagccttcttcatcagatacatttttcagattttccccttcctcgtcagaggcagatattcatctcctagttcatgttcataaacatgtcagtatgcagattaatcactaccagtatctgcttctacttttcctgcatgagtcacttatcctgctttcagagaacttaaggaaagatgtagaagctgtaactggcagtcctgctagtcagacatccatttgtattggaattttacttagaagtgcagaactggctcttttgctccatccagtggatcaagcaaatactcttaagtctcctgtttctgaaagtgtgagcccagtggtacctgattatttgcctacagaaaatggggattttttgtcttcaaaaagaaaacaaattagtagggatataaatagaattagaagtgtaactgttaatcatatgtcagacaacagatctatgagtgttgaccttagccatatccctttaaaggatcctttgctttttaaatcagctagtgatacaaatctgcaaaaaggcatttcttttatggactatttatcagataaacatttagggaaaataagtgaagatgaaagtagtggacttgtttacaaaagtggctcaggagaaattggatcagaaacaagtgacaaaaaggattcattttatacagattcaagtagtatcttaaactacagagaagattcgaatatactttcatttgatagtgatggtaatcaaaacatactttcaagtactttaactagtaaaggaaatgaaaccatagagtccatctttaaagctgaagatttgcttccagaagcagcttcactctctgaaaacctggatatcagtaaagaagagacccccccagttagaacacttaaatcacagtcatctttaagtggaaagcctaaggaacgttgcccacccaacctggctcctctctgtgtttcttataagaatatgaaaagaagctcttcacaaatgtcattggataccatttcacttgacagcatgatattggaagaacagttattagaaagtgatggaagtgatagccatatgtttttggaaaaaggaaataaaaagaactcaactacaaattacaggggcacagcagaaagtgtgaatgctggtgcaaacctacagaattatggtgaaacttctccagatgccatcagtacaaattcagagggtgctcaggaaaatcatgatgacctgatgtccgttgtggtatttaaaattactggtgttaatggggaaattgacatccgaggggaagatacagaaatctgtcttcaagtgaaccaggtgacaccagaccaattaggcaatatcagccttcggcattacctttgtaatcgtccagttggttccgatcagaaagctgtaattcattccaaatcctctcctgagatttctctgagatttgaaagtgggcctggtgctgtaatacactctttacttgcagaaaaaaatggatttctgcagtgccacatagaaaacttcagcactgagtttcttacatcttctcttatgaatattcaacattttttggaagatgaaactgttgcaacagtaatgccaatgaagatacaagtttctaacacgaaaataaatttaaaagatgatagtccccggagtagtacagtatcccttgaaccagctcctgtaactgtacatattgatcatcttgtggtagagagaagtgacgatggctcttttcatatcagagattctcacatgcttaacactggaaatgatttgaaagaaaatgtcaaaagcgattcagtgctgctgaccagtggaaagtatgatctgaagaaacaacgcagtgtcacgcaagccactcagacaagcccaggggttccttggccttctcagtcagctaactttcctgagttctcctttgacttcactagggaacagctcatggaagagaatgaatctcttaaacaggaactggctaaagctaaaatggctcttgcagaggctcacttggaaaaagatgctcttcttcatcatataaagaagatgacagttgaatagcaggagtggcagtcaaaactgaaattatagctctggagtaggaaggttatatttataatgtggatgttaccagttaggggaagacttttattttcatgaaaagacaataaaacaaaatggaatgtgatgaagtggtgactatttcaaagccagtttagaaagtattagtacgggcattacaatcttttggttgttttgtgttttggggcttaaccctcttttaagctgttgtgatctagggaagtcaacacatagtgtaaaataattacatgcctaatgaaaagaagatgtcatttcctaattttgatatctcattttcggcattttttaaaatgtaaaaggaaaacctcttgtgttcacacagattgctgaattgatttctccatatttgttaataatttactattatttacaaagattcaaatgcttttatgactaatgtaaaatgaaaagaggcttacattttaaatgttattaaaattatgtacttaaatctataattatttaattattgtaaaaagtccaagcagatcaataaactatataattaaaaaaaaaaaaaaaaaaaaaa

SEQ ID NO: 233 - DNA, 2121 bp, Homo sapiens
atggcctcgccggctgacagctgtatccagttcacccgccatgccagtgatgttcttctcaaccttaatcgtctccggagtcgagacatcttgactgatgttgtcattgttgtgagccgtgagcagtttagagcccataaaacggtcctcatggcctgcagtggcctgttctatagcatctttacagaccagttgaaatgcaaccttagtgtgatcaatctagatcctgagatcaaccctgagggattctgcatcctcctggacttcatgtacacatctcggctcaatttgcgggagggcaacatcatggctgtgatggccacggctatgtacctgcagatggagcatgttgtggacacttgccggaagtttattaaggccagtgaagcagagatggtttctgccatcaagcctcctcgtgaagagttcctcaacagccggatgctgatgccccaagacatcatggcctatcggggtcgtgaggtggtggagaacaacctgccactgaggagcgcccctgggtgtgagagcagagcctttgcccccagcctgtacagtggcctgtccacaccgccagcctcttattccatgtacagccacctccctgtcagcagcctcctcttctccgatgaggagtttcgggatgtccggatgcctgtggccaaccccttccccaaggagcgggcactcccatgtgatagtgccaggccagtccctggtgagtacagccggccgactttggaggtgtcccccaatgtgtgccacagcaatatctattcacccaaggaaacaatcccagaagaggcacgaagtgatatgcactacagtgtggctgagggcctcaaacctgctgccccctcagcccgaaatgccccctacttcccttgtgacaaggccagcaaagaagaagagagaccctcctcggaagatgagattgccctgcatttcgagccccccaatgcacccctgaaccggaagggtctggttagtccacagagcccccagaaatctgactgccagcccaactcgcccacagagtcctgcagcagtaagaatgcctgcatcctccaggcttctggctcccctccagccaagagccccactgaccccaaagcctgcaactggaagaaatacaagttcatcgtgctcaacagcctcaaccagaatgccaaaccagaggggcctgagcaggctgagctgggccgcctttccccacgagcctacacggccccacctgcctgccagccacccatggagcctgagaaccttgacctccagtccccaaccaagctgagtgccagcggggaggactccaccatcccacaagccagccggctcaataacatcgttaacaggtccatgacgggctctccccgcagcagcagcgagagccactcaccactctacatgcaccccccgaagtgcacgtcctgcggctctcagtccccacagcatgcagagatgtgcctccacaccgctggccccacgttccctgaggagatgggagagacccagtctgagtactcagattctagctgtgagaacggggccttcttctgcaatgagtgtgactgccgcttctctgaggaggcctcactcaagaggcacacgctgcagacccacagtgacaaaccctacaagtgtgaccgctgccaggcctccttccgctacaagggcaacctcgccagccacaagaccgtccataccggtgagaaaccctatcgttgcaacatctgtggggcccagttcaaccggccagccaacctgaaaacccacactcgaattcactctggagagaagccctacaaatgcgaaacctgcggagccagatttgtacaggtggcccacctccgtgcccatgtgcttatccacactggtgagaagccctatccctgtgaaatctgtggcacccgtttccggcaccttcagactctgaagagccacctgcgaatccacacaggagagaaaccttaccattgtgagaagtgtaacctgcatttccgtcacaaaagccagctgcgacttcacttgcgccagaagcatggcgccatcaccaacaccaaggtgcaataccgcgtgtcagccactgacctgcctccggagctccccaaagcctgctga

SEQ ID NO: 234 - DNA, 812 bp, Homo sapiens
agcacatcccaaaagaataacatttcaaatgtaactagaaaaaagtatgctgaagttcgcaatacagaaataattattaataagatagctttaaagccctgctcagcttttgaatgttgggaattgacccagaggtggctgtaacctaagatggttccttcagtaatgaccattttttctttttcaagatgatgattattccccaccttctaagagacaaagaccaacgagccaccacagccaccagtcccagaacccgccaatgctggggaacggaaaatgagggagttcaactctggccctcacaatccagtggaggagacgaaactcatctgcctctgtccctctgggcacgcctcatgccaggtgcatctgtggacaggggccatgctcctgggcttccaaagttggagaaagctgccaggctcaggtctgaaggccagaattctacagtaagtcctactgagtcaaggtgggagcagggtcggtagcttccgaggctctgcgggagaatccgtttcctggccgtagaggtggcctgcactcctcagcttgtgctgcccgtctcgaatgactggagtttcctgcttctgtcactacacctcccaccctctccatcacctgctctgctcttacaaggatccgaagaaatggaatcatcgtatcgctgatctacgtaaacaaactgaagaattgtctgaaagaaaatatggtatgtctaaactggaaaagtcttgtaatcttatgttcatgggcgtttacacagtggagttactgttcatcatgggggtaccgtggacaagcccagggct

SEQ ID NO: 235 - DNA, 1596 bp, Homo sapiens
atgatcagcccagaccccaggccctcccctggcttggcccggtgggctgagagctatgaggccaagtgtgagcgcaggcaagagatccgtgaaagccgccgctgccgtcccaatgtgaccacttgccgccaggtggggaagacgctgaggatccaacagagagagcagctccagagagctcgactgcagcagttcttcaggaggaggaacctggagctagaggagaagggcaaagcgcagcatccccaggccagggagcaagggccctccaggcggccaggacaggtgacaggcaccagctctgaagtctttccagcccagcatcctcctccctcaggcatctgcagggatctgtctgaccacctctcctcacaggctgggggccttcctccacaggacactcccatcaagaagccacccaaacaccaccgtggtactcagacaaaggcagaaggaccaacaattaagaacgatgccagtcagcaaaccaattacggagttgcagttctggataaggaaatcatccagctttctgattacctcaaagaggccctacaaagggagctggtcctaaaacagaaaatggtgattctccaagacctactgtccactctgattcaggcctctgacagctcttggaagggacagcttaatgaagacaaactgaaggggaaactgagatccttagaaaaccagctatacacctgtacccagaaatactccccttggggaatgaaaaaagtactactggagatggaagaccagaaaaacagctatgagcagaaggccaaggagtcactgcagaaagtgctggaggagaaaatgaatgcagagcagcaactacagagcacacagcgatccctggccctggcagagcagaagtgtgaagagtggaggagccagtatgaggctctgaaggaggactggaggacccttgggacccagcacagggagctggagagccaactccacgtgcttcagtccaaactgcagggagcagatagcagggacttacagatgaaccaggccctgcgatttttggaaaatgagcaccagcaactgcaggccaagattgaatgcctgcaaggggacagagacctgtgcagcttggatacccaggacctacaagatcaactaaaaaggtcagaggcagagaaactcaccctggtgaccagagtacagcagttgcagggtttgcttcaaaatcaatccttacagcttcaagaacaggagaaactcttaacaaagaaagatcaggctttgcccgtgtggagtccaaagtccttccctaacgaagtggagcctgagggtacagggaaggagaaagactgggatctcagagaccagctgcaaaagaagactttgcagctccaggccaaggaaaaggagtgcagagaactgcattcagaattagacaacctcagtgacgagtatctctcctgcctgcgtaagctgcagcactgtcgagaagagctgaaccagagccagcagctgcctcccagaaggcaatgtgggcgatggctcccagtgctgatggtggtgattgctgcagcactggcagtgttcctggccaataaagacaacctgatgatctga

SEQ ID NO: 236 - DNA, 393 bp, Homo sapiens
atgtctggacgtggaaagcaaggcggcaaagctcgggcaaaagctaaaacgcgttcttccagggccggtcttcagtttccagttggccgtgtgcaccgcctcctccgcaaaggcaactactccgaacgagtcggggccggcgctccagtgtacctggcagcggtgctggaatatctgacggccgagatcttagagctagctggcaacgcggctcgcgacaataagaagacccgcatcatcccgcgccacctgcagctagccatccgcaacgacgaggagctaaataagcttctaggtcgcgtgaccatcgcgcagggcggtgtcctgcccaacatccaggccgtattgctgcctaagaagacggagagccaccataaggccaagggcaagtga

SEQ ID NO: 237 - DNA, 1410 bp, Homo sapiens
atggggactgtgcacgcccggagtttggagcctcttccatcaagtggacctgattttggaggattaggagaagaagctgaatttgttgaagttgagcctgaagctaaacaggaaattcttgaaaacaaagatgtggttgttcaacatgttcattttgatggacttggaaggactaaagatgatatcatcatttgtgaaattggagatgttttcaaggccaaaaacctaattgaggtaatgcggaaatctcatgaagcccgtgaaaaattgctccgtcttggaatttttagacaagtggatgttttgattgacacatgtcaaggtgatgacgcacttccaaatgggttagacgttacctttgaagtaactgaattgaggagattaacgggcagttataacaccatggttggaaacaatgaaggcagtatggtacttggcctcaagcttcctaatcttcttggtcgtgcagaaaaggtgacctttcagttttcctatggaacaaaagaaacttcgtatggcctgtccttcttcaaaccacggcccggaaacttcgaaagaaatttctctgtaaacttatataaagttactggacagttcccttggagctcactgcgggagacggacagaggaatgtcagctgagtacagttttcccatatggaagaccagccacactgtcaagtgggaaggcgtatggcgagaactgggctgcctctcaaggacggcgtcatttgctgttcgaaaagaaagcggacattcactgaaatcatctctttcgcacgccatggtcatcgattctcggaattcttccatcttaccaaggagaggtgctttgctgaaagttaaccaggaactggcaggctacactggcggggatgtgagcttcatcaaagaagattttgaacttcagttgaacaagcaactcatatttgattcagttttttcagcgtctttctggggcggaatgttggtacccattggtgataagccgtcaagcattgctgataggttttaccttgggggacccacaagcatccgcggattcagcatgcacagcatcgggccacagagcgaaggagactacctaggtggagaagcgtactgggccggcggcctgcacctctacaccccattacctttccggccaggccagggtggctttggagaacttttccgaacacacttctttctcaacgcaggaaacctctgcaacctcaactatggggagggccccaaagctcatattcgtaagctggctgagtgcatccgctggtcgtacggggccgggattgtcctcaggcttggcaacatcgctcggttggaacttaattactgcgtccccatgggagtacagacaggcgacaggatatgtgatggcgtccagtttggagctgggataaggttcctgtag

SEQ ID NO: 238 - DNA, 889 bp, Homo sapiens
tggaatcaacccaaatgcccatcagtgatagactggataaagaaaatatgggatcttcatggctctgactcagatggacacagcagcattccgaggcttgcatcgtgaatttttagctccagatcgactgcaagaacaaaccagcaatcctgagaggacccacagaccctctgaaggaagcagactgctcctgcaggacccaggaaacacctcaaatactgtggcagtgacgaaagaagagactctcccggccgaggccccagtgcatggagagaaggaagaaatcaatttcctaattggtaccatatacatcagatggatggtttctagtgtgcttccaaaccccacctcggctgagtgttgggcagcacttctacatgatcctatgactcttgatatggacgcagtcctgtcagactttgttcggtccacgggggcagaacctggtctggccagagacctgctggaagcaatgttcacagcatctttaccgggagcagattccatctcaagaaaccacttcctttgctcatccataagaagcaactccccaacttgagattgtagcaatttagtcacatcttcagactccacttctaattccagttctcttccacgacatctgcagttaattcttccactgaagtcttggaccccacaaagtcatccatgagagttggaatccacttcttacaacctcctgttaatgtcgataatttgacctcctcccatgaatcatagatgttcttattgacttctagagttgtgaatcctttccagaaggttttcaatgtactttgcccagatctatcagaggaatcactgtctatggcagttatagccttataaaatgtatttcttaagtaataagagttgcaagtcaaaatta

SEQ ID NO: 239 - DNA, 1428 bp, Homo sapiens
atggcaggacggcctcatccctatgatggtaactccagtgatccagagaattgggatcggaaattgcatagtagacctcgtaaactttataaacattcaagtacttcctcgcgtattgctaaaggaggagttgaccacaccaaaatgagtctacatggtgctagtgggggacatgagagatcaagagatagacgaaggtcaagtgacagatcacgagattcatctcatgaaagaacggagtctcagctcactccttgtattagaaatgtgacttctccaacacgacagcaccatgttgaacgagaaaaagatcacagttcctctcgtccaagcagtccgcgtcctcaaaaagcatccccaaatggttccattagcagtgctgggaacagcagcagaaacagtagtcagtcaagttcagatggtagctgtaagacagctggggagatggtgtttgtatatgaaaatgcaaaagaaggagctcggaatataagaacgtcagaacgagtgacactaatagtggataacactagatttgttgtagacccatccatttttactgcacagccaaatacaatgttgggcaggatgtttggatctggccgagaacataactttacacgacccaatgagaaaggagagtatgaggtggcagagggaattggttccactgtgtttcgagcgattctggattactataaaacaggaataatccgttgtcctgatggcatatctattcctgaactgagagaagcatgtgactatctttgtatctcttttgaatatagcactattaaatgtagagatctcagtgccctaatgcatgagttatcaaatgatggtgctcgtagacaatttgaattttatctggaagaaatgatcctccctctcatggtagctagtgcccagagtggggaacgggaatgtcatatagtggtgcttacagatgatgatgtggttgattgggatgaagaatatccaccacagatgggagaagaatattcacaaattatttatagcacaaaattatatagatttttcaagtatattgaaaacagagatgtggccaagtcagttttgaaggagaggggtcttaagaagattagattgggaatagaaggttatcctacctacaaagaaaaagtaaagaaaaggcctggaggccgcccagaagtgatctacaactatgtccaaagaccctttattcgaatgtcctgggagaaggaagaaggaaagagtcggcatgtagactttcagtgtgtaaagagtaaatctatcaccaatcttgcagcagctgcagcagacattccccaggaccagctggtagtcatgcatccaactccacaagtggatgagctggatattctccctatccatcccccttctggcaacagtgacctcgatcctgatgcacagaatccaatgctgtga

SEQ ID NO: 240 - DNA, 1236 bp, Homo sapiens
gttgctttcctcccacccggatctaggcgcgcaggggccaagcagggacgcagcccagtggctccagccacgccgtcctgcccccttctgcagaaactgatgctctgagaggccaagcagtttgcccaagattacacagtcatagccgtgcctgggagaaccttctcttcaactctgccgcaccactgtcaagctcacctttcttctaaggttttattttagagttaacatcctccaaaaagccttcctcaggagttgaaggtgcccctaatatcacagccatggcatcctgtacactggaccttattgtctgtctgcctgttgtaccttgtatgagtctataagcaaaacctataagaagccacatctggctattctatgtactcaaaaaataattggcaagtgaaagaatgaggaaaaggagaaaaaattcagaaggcccctaccccttccaatgggtcaagtcaggaatttcctacctgcatgtgattccctgtgtcctagagggttttatttactcctcagaccttggaaactgttaaccagagtctctgtttggagatcttatctgtgtgcttctccatgggtgttgtttccctgtctctgcagccatgcattcctcagctctttaagtggtggagcctgtctgcctggatagagtgcaaaagctacagtgtaatcttgctttctttcagggccactgaccagaggaaataaaaactggactgattgggctctcctgatgtagaccagccagtggccctctaagtttccttctatgtttaaaattccttatctgacattgctagctgatcagcaggcccacaggtcagctgagggcttatctccagggctggagcttcaaagagatacatgcacacgactcccctgggtcagatgggctgtgtcacagtgagttggggataatttgggatcagtcaacataacacacataacacaacccattaattttttttttcaaaaagcgaagtttattttactttttcccattatgaaagtcatcaatgctcattatagaaaatttggcaaataacaaaaagtggaaagaaaaaaattccttaataatttagtatatttgatatattcatccttaatccttaatcttttactatgttatatctttaatagttgtgatgatatactttttgtaataaatatatatttgtgttgtggcttttttaaaatttaaaaaaaaaaacaaaaaaaaaaaaaaaa

SEQ ID NO: 241 - DNA, 1278 bp, Homo sapiens
atgtcgtccatcctgcctttcactcccccgatcgtgaagcgcctgctgggctggaagaagggcgagcagaacgggcaggaggagaaatggtgcgagaaggcggtcaagagcctggtcaagaaactcaagaagacggggcagctggacgagctggagaaggccatcaccacgcagaacgtcaacaccaagtgcatcaccatccccaggtccctggatggccggttgcaggtgtcccatcggaaggggctccctcatgtcatctactgccgcctgtggcgatggccagacctgcacagccaccacgagctacgggccatggagctgtgtgagttcgccttcaatatgaagaaggacgaggtctgcgtgaatccctaccactaccagagagtagagacaccagttctacctcctgtgttggtgccacgccacacagagatcccggccgagttccccccactggacgactacagccattccatccccgaaaacactaacttccccgcaggcatcgagccccagagcaatattccagagaccccaccccctggctacctgagtgaagatggagaaaccagtgaccaccagatgaaccacagcatggacgcaggttctccaaacctatccccgaatccgatgtccccagcacataataacttggacctgcagccagttacctactgcgagccggccttctggtgctccatctcctactacgagctgaaccagcgcgtcggggagacattccacgcctcgcagccatccatgactgtggatggcttcaccgacccctccaattcggagcgcttctgcctagggctgctctccaatgtcaacaggaatgcagcagtggagctgacacggagacacatcggaagaggcgtgcggctctactacatcggaggggaggtcttcgcagagtgcctcagtgacagcgctatttttgtccagtctcccaactgtaaccagcgctatggctggcacccggccaccgtctgcaagatcccaccaggatgcaacctgaagatcttcaacaaccaggagttcgctgccctcctggcccagtcggtcaaccagggctttgaggctgtctaccagttgacccgaatgtgcaccatccgcatgagcttcgtcaaaggctggggagcggagtacaggagacagactgtgaccagtaccccctgctggattgagctgcacctgaatgggcctttgcagtggcttgacaaggtcctcacccagatgggctccccaagcatccgctgttccagtgtgtcttag

SEQ ID NO: 242 - DNA, 4104 bp, Homo sapiens
cccacgcgtccgcccacgcgtccgcccacgcgtccgcccacgcgtccgcccacgcgtccgcccacgcgtccgcccacgcgtccggtgcaagctcgcgccgcacactgcctggtggagggaaggagcccgggcgcctctcgccgctccccgcgccgccgtccgcacctccccaccgcccgccgcccgccgcccgccgcccgcaaagcatgagtgagcccgctctctgcagctgcccggggcgcgaatggcaggctgtttccgcggagtaaaaggtggcgccggtcagtggtcgtttccaatgacggacattaaccagactgtcagatcctggggagtcgcgagccccgagtttggagttttttccccccacaacgtcacagtccgaactgcagagggaaaggaaggcggcaggaaggcgaagctcgggctccggcacgtagttgggaaacttgcgggtcctagaagtcgcctccccgccttgccggccgcccttgcagccccgagccgagcagcaaagtgagacattgtgcgcctgccagatccgccggccgcggaccggggctgcctcggaaacacagaggggtcttctctcgccctgcatataattagcctgcacacaaagggagcagctgaatggaggttgtcactctctggaaaaggatttctgaccgagcgcttccaatggacattctccagtctctctggaaagattctcgctaatggatttcctgctgctcggtctctgtctatactggctgctgaggaggccctcgggggtggtcttgtgtctgctgggggcctgctttcagatgctgcccgccgcccccagcgggtgcccgcagctgtgccggtgcgaggggcggctgctgtactgcgaggcgctcaacctcaccgaggcgccccacaacctgtccggcctgctgggcttgtccctgcgctacaacagcctctcggagctgcgcgccggccagttcacggggttaatgcagctcacgtggctctatctggatcacaatcacatctgctccgtgcagggggacgcctttcagaaactgcgccgagttaaggaactcacgctgagttccaaccagatcacccaactgcccaacaccaccttccggcccatgcccaacctgcgcagcgtggacctctcgtacaacaagctgcaggcgctcgcgcccgacctcttccacgggctgcggaagctcaccacgctgcatatgcgggccaacgccatccagtttgtgcccgtgcgcatcttccaggactgccgcagcctcaagtttctcgacatcggatacaatcagctcaagagtctggcgcgcaactctttcgccggcttgtttaagctcaccgagctgcacctcgagcacaacgacttggtcaaggtgaacttcgcccacttcccgcgcctcatctccctgcactcgctctgcctgcggaggaacaaggtggccattgtggtcagctcgctggactgggtttggaacctggagaaaatggacttgtcgggcaacgagatcgagtacatggagccccatgtgttcgagaccgtgccgcacctgcagtccctgcagctggactccaaccgcctcacctacatcgagccccggatcctcaactcttggaagtccctgacaagcatcaccctggccgggaacctgtgggattgcgggcgcaacgtgtgtgccctagcctcgtggctcagcaacttccaggggcgctacgatggcaacttgcagtgcgccagcccggagtacgcacagggcgaggacgtcctggacgccgtgtacgccttccacctgtgcgaggatggggccgagcccaccagcggccacctgctctcggccgtcaccaaccgcagtgatctggggccccctgccagctcggccaccacgctcgcggacggcggggaggggcagcacgacggcacattcgagcctgccaccgtggctcttccaggcggcgagcacgccgagaacgccgtgcagatccacaaggtggtcacgggcaccatggccctcatcttctccttcctcatcgtggtcctggtgctctacgtgtcctggaagtgtttcccagccagcctcaggcagctcagacagtgctttgtcacgcagcgcaggaagcaaaagcagaaacagaccatgcatcagatggctgccatgtctgcccaggaatactacgttgattacaaaccgaaccacattgagggagccctggtgatcatcaacgagtatggctcgtgtacctgccaccagcagcccgcgagggaatgcgaggtgtgattgtcccagtggctctcaacccatgcgctaccaaatacgcctgggcagccgggacgggccggcgggcaccaggctggggtctccttgtctgtgctctgatatgctccttgactgaaactttaaggggatctctcccagagacttgacattttagctttattgtgtcttaaaaacaaaagcgaattaaaacacaacaaaaaaccccaccccacaaccttcaggacagtctatcttaaatttcatatgagaactccttcctccctttgaagatctgtccatattcaggaatctgagagtgtaaaaaaggtggccataagacagagagagaataatcgtgctttgttttatgctactcctcccaccctgcccatgattaaacatcatgtatgtagaagatcttaagtccatacgcatttcatgaagaaccattggaaagaggaatctgcaatctgggagcttaagagcaaatgatgaccatagaaagctatgttcttactttgtgtgtgtgtctgtatgtttctgcgttgtgtgtctttgtaggcaagcaaacgttgtctacacaaacgggaatttagctcacatcatttcatgcccctgtgcctctagctctggagattggtggggggaggtggggggaaacggcaggaataagggaaagtggtagttttaactaaggttttgtaacacttgaaatcttttctttctcaaattaattatctttaagcttcaagaaacttgctctgacccctctaagcaaactactaagcatttaaaagagaatctaatttttaaaggtgtagcacctttttttttattcttcccacagagggtgctaatctcattatgctgtgctatctgaaaagaacttaaggccacaattcacgtctcgtcctgggcattgtgatggattgaccctccatttgcagtaccttcccagctgattaaagttcagcagtggtattgaggtttttcgaatatttatatagaaaaaaagtcttttcacatgacaaatgacactctcacaccagtcttagccctagtagttttttaggttggaccagaggaagcaggttaaatgagacctgtcctctgctgcactcagaaaaaataggcagtccctgatgctcagatcttagccttgatattaatagttgagaccacctacccacaatgcagcctatactcccaagactacaaagttaccatcgcaaaggaaaggttattccagtaaaaggaaatagttttctcaaccatttaaaaatattcttctgaactcatcaaagtagaagagcccccaaccttttctctctgccttcaagaaggcagacatttggtatgatttagcatcaacaacacatttatgagtatatgtaagtaatcagaggggcaaatgccacttgttattcctcccaagttttccaagcaagtacacacagatctctggtaggattaggggccacttgtgtttccggcttattttagtcgacttgtcagcaagtttgatgcctagtctatctgacatggcccagtagaacagggcattgatggatcacatgagatggtagaaggaacatcatcacatacccctctcacagagaaaattatcaaagaaccagaaattatatctgttttggagcaagagtgtcataatgtttcagggtagtcaaaataaacataaattatctcctctagatgagtggcgatgttggctgatttgggtctgccattgacagaatgtcaaataaaaaggaattagctagaatatgaccattaaatgtgcttctgaaatatattttgagataggtttagaatgtca

SEQ ID NO: 243 - DNA, 3282 bp, Homo sapiens
atgaaggagatggtaggaggctgctgcgtatgttcggacgagaggggctgggccgagaacccgctggtctactgcgatgggcacgcgtgcagcgtggtcgtccaccaagcttgctatggcatcgttcaggtgccaacgggaccctggttctgccggaaatgtgaatctcaggagcgagcagccagggtgaggtgtgagctgtgcccacacaaagacggggcattgaagaggactgataatggaggctgggcacacgtggtgtgtgccctctacatccccgaggtgcaatttgccaacgtgctcaccatggagcccatcgtgctgcagtacgtgcctcatgatcgcttcaacaagacctgttacatctgcgaggagcagggccgggagagcaaggcggcctcgggagcctgcatgacctgtaaccgccatggatgtcgacaagctttccacgtcacctgtgcccaaatggcaggcttgctgtgtgaggaagaagtgctggaggtggacaacgtcaagtactgcggctactgcaaataccacttcagcaagatgaagacatcccggcacagcagcgggggaggcggaggaggcgctggaggaggaggtggcagcatggggggaggtggcagtggtttcatctctgggaggagaagccggtcagcctcaccatccacgcagcaggagaagcaccccacccaccacgagaggggccagaagaagagtcgaaaggacaaagaacgccttaagcagaagcacaagaagcggcctgagtcgccccccagcatcctcaccccgcccgtggtccccactgctgacaaggtctcctcctcggcttcctcttcctcccaccacgaggccagcacgcaggagacctctgagagcagcagggagtcaaaggggaaaaagtcttccagccatagcctgagtcataaagggaagaaactgagcagtgggaaaggtgtgagcagttttacctccgcctcctcttcttcctcctcctcttcctcctcctctggggggcccttccagcctgcagtctcgtccctgcagagctcccctgacttctctgcattccccaagctggagcagccagaggaggacaagtactccaagcccacagcccccgccccttcagcccctccttctccctcagctcccgagccccccaaggctgacctttttgagcagaaggtggtcttctctggctttgggcccatcatgcgcttctccaccaccacctccagctcaggccgggcccgggcgccctcccctggggactataagtctccccacgtcacggggtctggggcctcggcaggcacccacaaacggatgcccgcactgagtgccacccctgtgcctgctgatgagacccctgagacaggcctgaaggagaagaagcacaaagccagcaagaggagccgccatgggccaggccgtcccaagggcagccggaacaaggagggcactgggggcccagctgccccatccttgcccagtgcccagctggctggctttaccgccactgctgcctcacccttctctggaggttccctggtcagctccggcctgggaggtctgtcctcccgaacctttgggccttctgggagcttgcccagcttgagcctggagtcccccttactaggggcaggcatctacaccagtaataaggaccccatctcccacagtggcgggatgctgcgggctgtctgcagcacccctctctcctccagcctcctggggcccccagggacctcggccctgccccgcctcagccgctccccgttcaccagcaccctcccctcctcttctgcttctatctccaccactcaggtgttttctctggctggctctacctttagcctcccttctacccacatctttggaacccccatgggtgccgttaatcccctcctctcccaagctgagagcagccacacagagccagacctggaggactgcagcttccggtgtcgggggacctcccctcaggagagtctgtcttccatgtcccccatcagcagcctccccgcactcttcgaccagacagcctctgcaccctgtgggggcggccagttagacccggcggccccagggacgactaacatggagcagcttctggagaagcagggcgacggggaggccggcgtcaacatcgtggagatgctgaaggcgctgcacgcgctgcagaaggagaaccagcggctgcaagagcagatcctgagcctgacggccaaaaaggagcggctgcagattctcaacgtgcagctctctgtgcccttccctgccctgcctgctgccctgcctgccgccaacggccctgtccctgggccctatggcctgcctccccaagccggcagcagcgactccttgagcaccagcaagagccctccgggaaagagcagcctcggcctggacaactcgctgtccacttcttctgaggacccacactcaggctgcccgagccgcagcagctcgtcgctgtccttccacagcacgcccccaccgctgcccctcctccagcagagccctgccactctgcccctggccctgcctggggcccctgccccactcccgccccagccgcagaacgggttgggccgggcacccggggcagcggggctgggggccatgcccatggctgaggggctgttgggggggctggcaggcagtgggggcctgcccctcaatgggctccttggggggttgaatggggccgctgcccccaaccccgcaagcttgagccaggctggcggggcccccacgctgcagctgccaggctgtctcaacagccttacagagcagcagagacatctccttcagcagcaagagcagcagctccagcaactccagcagctcctggcctccccgcagctgaccccggaacaccagactgttgtctaccagatgatccagcagatccagcagaaacgggagctgcagcgcctgcagatggctgggggctcccagctgcccatggccagcctgctggcaggaagctccaccccgctgctgtctgcgggtacccctggcctgctgcccacagcgtctgctccacccctgctgcccgctggagccctagtggctccctcgcttggcaacaacacaagtctcatggccgcagcagctgcagctgcagcagtagcagcagcaggcggacctccagtcctcactgcccagaccaaccccttcctcagcctgtcgggagcagagggcagtggcggtggccccaaaggagggaccgctgacaaaggagcctcagccaaccaggaaaaaggctaa

SEQ ID NO: 244 - DNA, 3978 bp, Homo sapiens
atgaaagaacctttggatggtgaatgtggcaaagcagtggtaccacagcaggagcttctggacaaaattaaagaagaaccagacaatgctcaagagtatggatgtgtccaacagccaaaaactcaagaaagtaaattgaaaattggtggtgtgtcttcagttaatgagagacctattgcccagcagttgaacccaggctttcagctttcttttgcatcatctggcccaagtgtgttgcttccttcagttccagctgttgctattaaggttttttgttctggttgtaaaaaaatgctttataagggccaaactgcatatcataagacaggatctactcagctcttctgctccacacgatgcatcaccagacattcttcacctgcctgcctgccacctcctcccaagaaaacctgcacaaactgctcgaaagacattttaaatcctaaggatgtgatcacaactcgctttgagaattcctatcctagcaaagatttctgcagccaatcatgcttgtcatcttatgagctaaagaaaaaacctgttgttaccatatataccaaaagcatttcaactaagtgcagtatgtgtcagaagaatgctgatactcgatttgaagttaaatatcaaaatgtggtacatggtctttgtagtgatgcctgtttttcaaaatttcactctacaaacaacctcaccatgaactgttgtgagaactgtgggagctattgctatagtagctctggtccttgccaatcccagaaggtttttagttcaacaagtgtcacggcatacaagcagaattctgcccaaattcctccatatgccctggggaagtcattgaggccctcagctgaaatgattgagactacaaatgattcaggaaaaacagagcttttctgctctattaattgcttatctgcttacagagttaagactgttacttcttcaggtgtccaggtttcatgtcatagttgtaaaacctcagcaatccctcagtatcacctagccatgtcaaatggaactatatacagcttctgcagctccagttgtgtggttgctttccagaatgtatttagcaagccaaaaggaacaaactcttcggcggtgcccctgtctcagggccaagtggttgtaagcccgccctcctccaggtcagcagtgtcaataggaggaggtaacacctctgccgtttcccccagctccatccgtggctctgctgcagccagcctccaacctcttgctgaacaatcccagcaagttgctttaacccatacagttgttaaactcaagtgtcagcactgtaaccatctatttgccacaaaaccagaacttcttttttacaagggtaaaatgtttctgttttgtggcaagaattgctctgatgaatacaagaagaaaaataaagttgtggcaatgtgtgactactgtaaactgcagaaaattataaaggagactgtgcgattctcaggggttgataagccattctgtagtgaagtttgcaaattcctctctgcccgtgactttggagaacgatggggaaactactgtaagatgtgcagctactgttcacagacatccccaaatttggtagaaaatcgattggagggcaagttagaagagttttgttgtgaagattgtatgtccaaatttacagttctgttttatcagatggccaagtgtgatggttgtaaacgacagggtaaactaagcgagtccataaagtggcgaggcaacattaaacatttctgtaacctattttgtgtcttggagttttgtcatcagcaaattatgaatgactgtcttccacaaaataaagtaaatatttctaaagcaaaaactgctgtgacggagctcccttctgcaaggacagatacaacaccagttataaccagtgtgatgtcattggcaaaaatacctgctaccttatctacagggaacactaacagtgttttaaaaggtgcagttactaaagaggcagcaaagatcattcaagatgaaagtacacaggaagatgctatgaaatttccatcttcccaatcttcccagccttccaggcttttaaagaacaaaggcatatcatgcaaacccgtcacacagaccaaggccacttcttgcaaaccacatacacagcacaaagaatgtcagacagatttacctatgcctaatgaaaaaaatgatgcagaacttgattctccaccttcaaagaaaaaaagattaggttttttccagacttatgatacagaatatttaaaagttggttttattatctgtcctggatcaaaagaaagttcaccaaggccacagtgtgtcatttgtggagagatcttatccagtgaaaacatgaagccagcaaatctttctcatcatttgaagacaaaacattcagaattagaaaacaaaccagtagatttttttgaacaaaaatctttagaaatggaatgtcaaaatagttctttaaaaaagtgtttactagttgaaaagtcacttgtgaaagcttcttatttaattgctttccaaactgctgcaagcaagaagccattctccattgctgaagaattaattaaaccatatttagtagaaatgtgttcagaagttttgggttcaagtgctggagacaaaatgaaaactattccactttctaatgttacaattcaacacaggattgatgaactatctgcagacattgaagaccagctgattcaaaaggtcagagagtcaaagtggtttgcccttcagatagatgagtcatcagaaatctcaaatatcacacttcttttgtgctatattcgtttcattgattatgattgtcgtgatgtaaaagaagaattattattttgcattgaaatgcctactcaaataactggctttgaaatatttgaactaataaataaatatattgatagtaaatctctgaattggaaacattgtgttggtctctgtaccgatggggctgcaagcatgactggcaggtattctggtttaaaagcaaaaattcaagaagttgccatgaatacagcggcatttacacattgttttattcaccgtgaacgtttagtggcagaaaagttgtctccatgtttacataaaattcttttgcagtcagcacaaattttaagttttataaagagcaatgcattaaattcacgtatgttaacaattttgtgtgaagagatgggatctgagcatgtgagtttaccgcttcatgctgaagtacgttggatatcaagagggagaatgttaaaaagattatttgaattacgacatgagattgaaatatttttaagtcaaaagcattcagatttggccaagtattttcatgatgaggaatgggttggaaagctggcctacttatcagatatattttcacttataaatgaattaaatttaagtctccaaggaactttgactactttcttcaatttgtgtaataaaattgatgtatttaagagaaagttaaaaatgtggttgaagcgcacacaagagaatgattatgacatgttcccttcattttctgaattctcaaattcatcaggcttaaatatgacagacatcacaaggattatttttgagcacctggaaggactttctcaagtgttcagtgactgttttccaccagaacaagacttgcgttcaggaaatttgtggataattcacccttttatgaatcaccaaaataataatctcaccgacttcgaagaagaaaagctaacagagctatcttcagatttaggattacaagcactatttaaatcagtgtctgtaactcagttttggataaatgcaaagacaagttacccagaactccatgaaagggcaatgaaatttttattacccttttcaactgtttatttatgtgatgctgccttttcagctttgactgagtcaaaacaaaaaaatctgttgggttctggccctgccctaagacttgcagtcacatctttaattccaaggatagaaaaattagtgaaggagaaagagtag

SEQ ID NO: 245 - DNA, 2390 bp, Homo sapiens
aaggaacatggccctgtatcagaggtggcggtgtctccggctccaaggtttacaggcttgcaggctacacacggcagttgtgtcgacccctccacgctggttggcagagcggcttggcctttttgaggagctgtgggctgctcaggtaaagagattagcaagcatggcacagaaggaaccccggactattaagatatcacttcctggaggccagaaaattgatgctgtggcatggaacacaaccccctaccaactagcccggcagatcagttcaacactggcagatactgcagtggctgctcaagtgaatggagaaccttatgatctggagcggcccttggagacagattctgacctcagatttctgacattcgattccccagaggggaaagcagtgttctggcactccagcacccatgtcctgggggcagcagctgaacaattcctaggtgctgttctctgcagaggtccaagtacagaatatggcttttaccatgatttcttcctgggaaaggagaggacaatccggggctcagagctgcctgttttggagcggatttgccaggaacttacagctgctgctcgacccttccggaggctagaggcttcacgggatcagcttcgccagttgttcaaggataacccctttaagcttcacttgattgaggagaaagtgacaggtccaacagcaacagtatatgggtgtggcacattggttgacctttgccagggcccccaccttcggcatactggacagattggaggactgaagctgctatcgaactcatcatccttatggaggtcttcaggggccccagagacactgcagagagtgtcagggatttccttccccacaacagaattgctgagggtctgggaagcatggagggaggaagcagaattgcgggaccaccggcgcattgggaaggaacaggagctcttcttcttccatgaactgagccctgggagctgcttcttcctgccacgagggacaagggtgtataatgcactagtggcgtttatcagggctgagtatgcccatcgtggtttctccgaggtgaaaactcccacactgttttctacgaagctctgggaacagtcagggcactgggagcattatcaggaagacatgtttgccgtgcagcccccaggctctgacaggcctcccagctcccagagtgacgattctaccaggcatatcacagatacactcgccctcaagcctatgaactgccctgcacactgcctgatgttcgcccaccggcccagatcctggcgggaactgcccctgcgactagctgactttggggctctacaccgggccgaagcctctggtggtctggggggactgacccgactgcggtgcttccagcaggatgacgctcacatcttctgtacaacagatcagctggaagcagagatccaaagctgtcttgatttcctccgttccgtctatgccgttcttggcttctccttccgcctggcactgtccacccggccatctggcttcctgggggacccttgcctttgggaccaggccgaacaggtccttaaacaggccctgaaggaatttggagaaccctgggacctcaactctggagatggtgccttctatggacctaagattgacgtgcacctccacgatgccctgggccggccacatcagtgtgggacaattcagcttgacttccaactgcccctgagatttgacctccagtataaggggcaggcgggtgccctggagcgtccagtcctcattcaccgagcagtgctcggttctgtggaaagactgttgggagtgctggcagaaagctgcggggggaaatggccactgtggctgtccccgttccaggtggtggtcatccctgtggggagtgagcaagaggaatacgccaaagaggcacagcagagcctgcgggctgcaggactggtcagtgacctggatgcagactctggactgaccctcagccggagaatccgccgggcccagcttgcccactacaattttcagtttgtggttggccagaaagagcaaagtaagagaacagtgaacattcggactcgagataatcgtcgccttggggagtgggacttgcctgaggctgtgcagcgactggtggagctacagaacacgagggtcccaaatgccgaagaaattttctgagcctttgtacatagatgaggcaaaaacctgcgagtgccatcagcctccctcacatgggagaccccaacccagctgacaatgtggagcccccagaacttcagaactgtgtggaggcacatgtctgctctcctgaaaagagacttggtttggggaccccacaaaaggagggaagctgtagctgtttggatgtgaggagaatgaaactacaaaaaaaaaaaaaaaaaaa

SEQ ID NO: 246 - DNA, 3944 bp, Homo sapiens
atgggcagccccgagggccgcttccactttgccatcgaccgtgggggtaccttcacagacgtctttgcccagtgcccaggggggcacgtgcgggtcttaaaactgctctcagaggaccctgccaactatgcggacgcgccaaccgaaggcatccgccgcatcctggagcaggaggccggcatgctcctgccccgggaccagccgctggactccagtcatatcgccagcatccgcatgggcaccacagtggccaccaacgcactgctggagcggaagggggagcgggtggcgctgctggtgacacgtggcttccgagacctgctgcacattggcacccaagcccgtggggacctctttgacctggccgtgcccatgcctgaggtgctgtatgaagaggtgctggaggtggacgaacgcgtggtgctgcaccgtggagaggcgggcaccgggacgcctgtgaaaggccgcacgggggacctgctggaagtgcagcagcctgtggacctgggggccctgcgtgggaagctggaggggctgctatctcgaggcatccgcagcctggctgtggtgctcatgcactcgtacacgtgggcccagcatgagcagcaggtgggtgtgctggcccgggagctgggcttcacgcacgtgtcactgtcctcggaggccatgcccatggtgcgcatcgtccctcgggggcacacggcctgtgccgacgcctacctcacgcccgccatccagcgctacgtgcagggcttctgccgtggcttccagggccaactcaaggatgtgcaggtgttgttcatgcgctccgatggcggcctggcgcccatggacaccttcagcggctccagtgctgtgctctcgggcccggccggcggcgtggtgggctactcagccaccacctaccagcaggagggtggccagcctgtcatcggctttgacatgggaggcacgtccacggatgtgagccgctatgctggggaattcgagcacgtcttcgaggccagcacagctggcgtcaccctccaggccccgcagctggacatcaacaccgtggcagcgggagggggttcccgcctcttcttcaggtctggcctctttgtggttgggcccgagtcagcaggagcccacccaggacccgcctgctaccgcaaagggggccctgtgacagtgacggatgctaatctggtcctgggtcgcctgctgcctgcctccttcccctgcatttttgggccgggagagaaccaaccactttcccctgaggcctcccgcaaagccctggaggctgtggccactgaggtcaacagcttcctgaccaacgggccctgcccggcctccccgctgagcctggaggaggtggccatggggttcgtgcgcgtggccaacgaggccatgtgccggcccatccgtgcactcacgcaggcaagaggccatgacccctcagcccatgtgctggcctgctttgggggagctggtgggcagcatgcatgtgccatcgcccgggccctgggcatggacacggtgcacatccacaggcacagtgggctgctgtcggccctggggctggccctggctgacgtggtgcatgaggcacaggaaccctgctccctgctctacgcgcctgagaccttcgtgcagctggaccagaggctgagccgcctggaggagcagtgtgtggatgctctgcaggcccagggcttccccaggtcccagatcagcactgagagcttcctgcacctgcgctaccagggcacggactgtgctctgatggtgtctgcccaccagcacccagccacagcccgctcgccccgtgcgggggacttcggggcagcctttgtggagcggtacatgagggagtttggctttgtcatacctgagcggccggtggtcgtggacgatgtgcgagtgcggggcaccggccgcagtggtcttcgcctcgaggatgcccccaaagcccagaccgggcctccccgggtggacaagatgacccagtgctactttgaggggggctaccaggagacccctgtgtacctgctggcagagctgggctatgggcacaagctccatgggccctgcctcatcatcgacagtaacagcaccatcctggtggagccaggttgccaggcagaggtgaccaagacaggggacatctgcatctccgtgggggccgaagtccccggcacagtgggcccccagctggaccctatccagctgtccatcttctcacaccgcttcatgagcattgctgagcagatgggccgcatcctgcagcgcacagccatctccaccaacatcaaggagcgtctggacttctcctgtgccctctttgggcccgatggggggctggtgtccaatgccccccacatccctgtgcacctgggtgccatgcaggagacggtgcagttccagattcagcacctgggggccgatctccaccctggcgacgtgctactgagcaaccatcccagtgccgggggcagccacctgccagacctgactgttatcacaccggtgttttggccgggtcagacgcggcctgtgttctatgtggccagccgagggcaccacgcagacatcgggggcatcacaccaggctccatgcccccccactccaccatgctgcaacaggagggtgccgtctttctgtccttcaaacttgtccaggggggcgtcttccaggaggaggcggtgacggaggccctgcgggcgccaggcaaggtccccaactgcagcggaaccagaaacctgcacgacaacctgtcggacctccgtgcccaggtggcagccaaccagaagggcatccagctggtgggggagctcattgggcagtacggcctggacgtggtgcaggcctacatgggccatattcaggcaaacgctgagctggccgtgcgagacatgttgcgtgcctttggaacctcccggcaggcccggggcctgcccctggaggtgtcctcggaagaccacatggacgacggttcccccatccgcctccgtgtgcagatcagcctgagtcagggcagcgctgtgtttgacttcagcggcactgggccggaggtgtttggtaatctcaacgcaccgcgggccgtaaccctgtccgccctcatctactgcctgcgctgtctggtgggccgcgacatcccactcaaccagggctgcctggcgccagtgcgcgtggtcattccccgaggctccatcctggacccgtcgcccgaggcggcggtggtgggcggcaacgtgctcacgtcgcagcgcgtggtggatgtcatcctgggggcctttggggcctgcgccgcctcccagggctgcatgaacaacgtgaccctgggcaacgcccacatgggctactacgagacggtggcgggcggcgcgggcgcgggtcccagctggcacgggcgcagcggtgtgcacagccacatgaccaacacacgcatcaccgaccctgagatcctggagagccggtacccggtcatcctgcgccgcttcgagctgcggcggggctcggggggcagaggccgcttccgaggcggcgacggcgtcacccgcgagctgctctttcgtgaggaggcgctgctgtcagtgctgaccgagcgccgcgccttccggccatacgggctccacgggggcgagcctggcgcccgcggcctaaacctgctgatccgcaaaaacggccggacggtgaatctgggcggcaagacgtcggtgaccgtgtaccccggggatgtgttctgtctccacacgcccggcggcggtggctatggggacccggaggaccccgccccaccgccggggtcgcccccgcaagcactggcctttcccgagcacggcagcgtctatgagtatcgccgggcccaggaggccgtgtgaggatcccgcaataaagatgccttaagtctcccggttctggggacgcagctaaaaaaaaaaaaaaaaaaaaaaaaaaa

SEQ ID NO: 247 - DNA, 1512 bp, Homo sapiens
atggtgagcagtgtgttgtgccgctgtgtggcctccccgccgccggacgccgccgccaccgccgcctcttcgtctgcctcatcgccggcgtccgtgggggacccctgcggcggcgctatctgcgggggcccggaccaccggctgcgcctgtggagactctttcagacgctcgacgtcaaccgggacggcggcctgtgtgtcaacgacctggcggtggggctgcggcgcctgggactgcaccgcaccgagggcgagctccagaaaattgtacaagctggagataaggaccttgatgggcagctagactttgaagaatttgtccattatctccaagatcatgagaagaagctgaggctggtgtttaagagtttggacaaaaagaatgatggacgcattgacgcgcaggagatcatgcagtccctgcgggacttgggagtcaagatatctgaacagcaggcagaaaaaattctcaagagcatggataaaaacggcacgatgaccattgactggaacgagtggagagactaccacctcctccaccccgtggaaaacatccccgagatcatcctctactggaagcattccacgatctttgatgtgggtgagaatctaacggtcccggatgagttcacagtggaggagaggcagacggggatgtggtggagacacctggtggcaggaggtggggcaggggccgtatccagaacctgcacggcccccctggacaggctcaaggtgctcatgcaggtccatgcctcccgcagcaacaacatgggcatcgttggtggcttcactcagatgattcgagaaggaggggccaggtcactctggcggggcaatggcatcaacgtcctcaaaattgcccccgaatcagccatcaaattcatggcctatgagcagatcaagcgccttgttggtagtgaccaggagactctgaggattcacgagaggcttgtggcagggtccttggcaggggccatcgcccagagcagcatctacccaatggaggtcctgaagacccggatggcgctgcggaagacaggccagtactcaggaatgctggactgcgccaggaggatcctggccagagagggggtggccgccttctacaaaggctatgtccccaacatgctgggcatcatcccctatgccggcatcgaccttgcagtctacgagacgctcaagaatgcctggctgcagcactatgcagtgaacagcgcggaccccggcgtgtttgtgctcctggcctgtggcaccatgtccagtacctgtggccagctggccagctaccccctggccctagtcaggacccggatgcaggcgcaagcctctattgagggcgctccggaggtgaccatgagcagcctcttcaaacatatcctgcggaccgagggggccttcgggctgtacagggggctggcccccaacttcatgaaggtcatcccagctgtgagcatcagctacgtggtctacgagaacctgaagatcaccctgggcgtgcagtcgcggtga

SEQ ID NO: 248 - DNA, 4182 bp, Homo sapiens
atgctgtcgagaccgaagccaggggagtccgaggtggacctgctgcacttccagagtcagtttctcgcagctggtgcagccccagcagtgcagttggtgaagaaaggaaataggggcggtggtgatgccaactcagaccggcctccgctccaggaccatcgggatgtggtgatgttggacaatctcccagatttgcccccagctttggtcccttctcctccaaagagagccaggcccagccctggccactgcctgcctgaggatgaggacccagaagagaggctgaggaggcatgatcagcacatcactgctgtcttgactaagattattgaacgagatacaagttcagtggccgtgaatctgcctgtgcccagtggtgttgctttccctgctgtgttccttcgctcgcgggacacacaggggaaatcagcaacatctggtaagagaagcatctttgcccaggaaattgcggcaaggaggatagctgaagccaagggcccatcagttggggaagttgtgcccaacgtgggcccaccagagggtgccgtgacctgtgagacacccactcctaggaaccagggctgccagcttcctgggagcagccacagctttcagggacccaatctggtcacagggaaggggctcagggatcaagaagctgagcaggaagcccagactatccatgaagagaacatagcaagactgcaggccatggctcctgaggagatcctgcaggaacagcagcggttgctggcccagcttgaccccagcttggttgctttcttgagatctcacagccacacgcaagagcaaacaggagagacagcctctgaggagcagaggccaggaggaccctctgctaatgtcaccaaggaggaacccctcatgtcagcttttgccagtgagcccaggaagagagacaagctggagccagaagccccagctctggcattgcccgtgacccctcagaaagaatggctgcacatggacactgtcgagctggagaagctccactggacccaggacttgccccctgtccggcggcagcagacacaggagaggatgcaggctcgattcagtcttcagggagaactactggcccctgacgtggacctgcccacccacctgggtctgcaccaccatggagaggaggcagagagagcggggtattccctacaggagctgttccacctgacccgcagccaggtttcccagcagagagcactggcactgcatgtgttagcccaggtcatcagcagggcccaggctggtgagtttggggaccggctagcaggcagtgtcttaagcctccttttggatgctggtttcctcttcctactgcgcttctccttggatgacagagtggatggggtcattgcaaccgccatccgtgctcttcgggctctgctggtggctcctggagatgaggagctcctcgacagcaccttctcttggtaccatggagctttgacgttccctctgatgcccagccaggaggacaaggaggatgaggacgaggatgaagaatgcccagcaggaaaagcaaaaaggaaaagccctgaagaagaaagccggcctccacctgacctggcccgacatgatgtcatcaaggggctcctggctaccagcctgctgcctcggctgcgctacgtgctggaggtgacatacccaggacctgcggtggtccttgacatcctggctgtgctcatccgcctggcccggcattccctggaatcagccacaagggtcctggagtgccctcggctgatagagactatagttcgagagttcttgcccaccagttggtctcctgtgggggcagggcctacccctagtctatacaaagtaccctgtgctactgccatgaaactacttcgtgtcctggcctcagctgggaggaatattgctgcccggctgttgagcagctttgatctccggagccgcctgtgccgcatcatagctgaggctccccaagaactggccttgcccccagaggaagctgagatgctgagcaccgaggccctccgtctgtgggctgtggctgcctcctatggccagggcggttacctttacagggagctctacccagtgctgatgcgggccttgcaggtggtgccgcgggagctcagcacccacccacctcaacccctgtccatgcagcggatagcctcactgctcactctcctcacccagctaaccctggcagccggcagtacccctgctgaaaccatcagtgattctgctgaggccagcctctcggccaccccttccttagtcacttggacacaggtgtctgggctccagcctcttgttgagccgtgtctaaggcagaccttgaagttgctgtccagacctgagatgtggagagccgtgggcccagtgcccgttgcctgcctgttgttcctgggagcctactaccaggcctggagccagcaaccaagctcatgcccggaggattggctccaggacatgcagcgcctgtcagaggagctgctgctgccactgctgagtcagcccacactgggcagcctgtgggattcccttaggcactgctcccttctctgcaacccgctgtcctgtgtgccagcccttgaagctccccccagcctcgtgtcactgggctgctcgggaggctgcccccgtctcagtctggctggctcagcctcacccttcccattcctcactgccctcctctctcttcttaataccctggcccagatccacaaggggctgtgtggccagctggctgccatattggctgccccgggactccagaattacttcctccagtgtgtggctcctggggctgccccacacctcacacctttctctgcatgggccctgcgccatgagtaccacctgcagtacctggcactcgctctggcccagaaagcggcagcgctgcagccactgccagccacccatgctgccctctatcatggtatggccttggccctgctgagccggctgctgcccggaagtgagtacctcacccatgagctgctgctgagctgtgtattccggctggagttcctcccggaaagaacatcagggggtccagaggcagccgacttctctgaccagctgtcgttaggaagcagcagggtccctcggtgtgggcaagggactctgctggctcaggcctgccaggacctccccagcatccgcaactgctacctgactcattgctcgccagcccgagccagtctgctggcctcccaggctctgcaccgaggggagctacagcgagtcccaaccctgctactgcccatgcctacggagccgctgctgcccaccgactggcccttcctgccactgattcgcctctaccaccgggcttcagacaccccctcgggactctctcccacagacaccatgggcacagccatgcgggtcctgcagtgggtgctagttttggagagctggcgcccccaggctctctgggctgtgccccctgctgcccgcctggcacggctcatgtgtgtgttcctggtggacagtgagctgttccgggagtccccagtacagcatctggtggcagccctcctcgcccagctctgtcagcctcaagtcttgccaaacctcaacctggactgccgactccctggcctgacgtctttccctgacctctatgccaacttcctggatcattttgaggctgtctcttttggggaccacctctttggggccctggtcctcctgcccctgcagcgtcggttcagtgtcaccttgcgccttgccctctttggggaacacgtgggagccttgcgagctctgagcctgcctctgacccagttgcctgtgtccctggagtgttacacagtgcctcctgaagacaacctggccctccttcagctctacttccggaccctggttactggtgcgctccgcccacgttggtgccccgtgctctatgctgtggctgtggctcatgtcaatagcttcatcttctctcaggacccacagagctcagatgaggtcaaagctgcccgcaggagtatgctgcagaaaacatggctgctggcagatgagggtctccggcagcacctcctgcactataagcttcccaattccacgctcccagagggctttgagctctattctcagttgccccctctgcgtcagcactacctccagagactgacttcaacagtgctccaaaatggggtatcagagacctag

SEQ ID NO: 249 - DNA, 1794 bp, Homo sapiens
atggcggccgtgcaggcggccgaggtgaaagtggatggcagcgagccgaaactgagcaagaatgagctgaagagacgcctgaaagctgagaagaaagtagcagagaaggaggccaaacagaaagagctcagtgagaaacagctaagccaagccactgctgctgccaccaaccacaccactgataatggtgtgggtcctgaggaagagagcgtggacccaaatcaatactacaaaatccgcagtcaagcaattcatcagctgaaggtcaatggggaagacccatacccacacaagttccatgtagacatctcactcactgacttcatccaaaaatatagtcacctgcagcctggggatcacctgactgacatcaccttaaaggtggcaggtaggatccatgccaaaagagcttctgggggaaagctcatcttctatgatcttcgaggagagggggtgaagttgcaagtcatggccaattccagaaattataaatcagaagaagaatttattcatattaataacaaactgcgtcggggagacataattggagttcaggggaatcctggtaaaaccaagaagggtgagctgagcatcattccgtatgagatcacactgctgtctccctgtttgcatatgttacctcatcttcactttggcctcaaagacaaggaaacaaggtatcgccagagatacttggacttgatcctgaatgactttgtgaggcagaaatttatcatccgctctaagatcatcacatatataagaagtttcttagatgagctgggattcctagagattgaaactcccatgatgaacatcatcccagggggagccgtggccaagcctttcatcacttatcacaacgagctggacatgaacttatatatgagaattgctccagaactctatcataagatgcttgtggttggtggcatcgaccgggtttatgaaattggacgccagttccggaatgaggggattgatttgacgcacaatcctgagttcaccacctgtgagttctacatggcctatgcagactatcacgatctcatggaaatcacggagaagatggtttcagggatggtgaagcatattacaggcagttacaaggtcacctaccacccagatggcccagagggccaagcctacgatgttgacttcaccccacccttccggcgaatcaacatggtagaagagcttgagaaagccctggggatgaagctgccagaaacgaacctctttgaaactgaagaaactcgcaaaattcttgatgatatctgtgtggcaaaagctgttgaatgccctccacctcggaccacagccaggctccttgacaagcttgttggggagttcctggaagtgacttgcatcaatcctacattcatctgtgatcacccacagataatgagccctttggctaaatggcaccgctctaaagagggtctgactgagcgctttgagctgtttgtcatgaagaaagagatatgcaatgcgtatactgagctgaatgatcccatgcggcagcggcagctttttgaagaacaggccaaggccaaggctgcaggtgatgatgaggccatgttcatagatgaaaacttctgtactgccctggaatatgggctgccccccacagctggctggggcatgggcattgatcgagtcgccatgtttctcacggactccaacaacatcaaggaagtacttctgtttcctgccatgaaacccgaagacaagaaggagaatgtagcaaccactgatacactggaaagcacaacagttggcacttctgtctag

SEQ ID NO: 250 - DNA, 2103 bp, Homo sapiens
atgacattgactcacatgcaagccccaaacatgccgaagctgcgggagctctctatcagccataggtgtgttggatgccacctgtgcccctccctggagatgcttttggccccacagcttcctccagccaatgtagcagtgactgggtctgtgcaggttttggtcaccttcactcaggttgagggcaccatcctccacaagaatccccaacttcagccaccagctggcaacaggtttgggggtcctcagcccaccctcacttctggccagatggctacaaatttggcgatttccactaccccctcaggtctgatttttatggttgacagtaatgacagagagcagattgatgaggcctgggaagtgctaacttacttgttagaggacgatgagctcagaaatgcagttttattggtatttgccaataaacaagatctccctaatactatgaacgcggcagagataacggacaagctcggcctccattccctccgctacagaaactggcacattcaggctacttgtgccactactggacatgggctttacgaaggcctgaactggctcgccaaccagttccagaaccagaactgatcagaaggatctattctttgtgccttgtggccacatcagctagcctctgctgtgtgcacgtgtacgtgtgtgctgggagtggaggcagctttctcacagtgccttatccatgccataagaaaagcagtgttacattttaagaaacccagtgttaagttttaaacaccaccttccatttcagtagctttgatgatcatttttgcaattgatggagaagtccagagggcttgctggtgctcgaaggccagagcgggcttcatggaggcgagttggagcggggactgagttcagctgttgcaatcctggtctggcgtctggagtcctgttagtctttggcatcctttcgtaaaaaggaaggaattgtcattcttttttttttaaaaccatatttttactgtaccttttcatgtttatttattttttattaaaaaaattttttttgaaacagcctcccactctgtcgcccaagctggagtgcagtggtgcgatctcagctcactgcaacctccgtctctcgggctcaagcaatcctcccacctcagccccctgagtagctgagactatgggtgtgcaccaccacacctggctaatttttgtattttttgtggagacagggtcttgccatgttgcccaggctggtctgtaactcctgagctcaagggatccacccacctcagccttccaaaatgctgggattacaggcatgagccactgcgctaccgagaaatcgtcattctttaccaccactgctgcagctagcagctcactcttcagtgctttaagcaaatgatcctcaggaaagaaaaggtatttgcttattgcaggtgcaaagaggctcagattggaacttttccctgaaactatattgtagcccagagttcctgatgtaagacgctttatttaaagacatccgtgagctttttcactggcatatcaatacttcataacactaggaaggtatccagccttttccttatgctagttccttcccttatttgccagatggggaccctgtggggaggtgacccagtgtgaggccgaagctctttcccagagccccacaggccagtggagggtcgtgtttgtgctctgggcatcaccgtcttgggtctcggtcccctgcgactgcagctgctacatccctccctgctctgagataaatgttcttcccatgaagcagacggttcacttttgggatggcgctgtctccaggtttggctgtctcagtccagatgatgtttggttagtttccattcccagaaccacaagcctttgagttctgaaagtttgtgacagaatcaagaggctaatttgggagatgtgagattcccagcccacctggtattgccctcgagttagtggtaaattttgctatggaaaatatctcttgtcaagaccaagctccggcgcattgcctccctcttttggatggccatggcatctcatgaaccacttggaaatgtgttttatgttgttctccaaatattaataaaaatatcccggagagga

SEQ ID NO: 251 - DNA, 1893 bp, Homo sapiens
atggcagagctgtgccccctggccgaggagctgtcgtgctccatctgcctggagcccttcaaggagccggtcaccactccgtgcggccacaacttctgcgggtcgtgcctgaatgagacgtgggcagtccagggctcgccatacctgtgcccgcagtgccgcgccgtctaccaggcgcgaccgcagctgcacaagaacacggtgctgtgcaacgtggtggagcagttcctgcaggccgacctggcccgggagccacccgccgacgtctggacgccgcccgcccgcgcctctgcacccagcccgaatgcccaggtggcctgcgaccactgcctgaaggaggccgccgtgaagacgtgcttggtgtgcatggcctccttctgtcaggagcacctgcagccgcacttcgacagccccgccttccaggaccacccgctgcagccgcccgttcgcgacctgttgcgccgcaaatgttcccagcacaatcggctgcgggaatttttctgccccgagcacagcgagtgcatctgccacatctgcctggtggagcataagacctgctctcccgcgtccctgagccaggccagcgccgacctggaggccaccctgaggcacaaactaactgtcatgtacagtcagatcaacggggcgtcgagagcactggatgatgtgagaaacaggcagcaggatgtgcggatgactgcaaacagaaaggtggagcagctacaacaagaatacacggaaatgaaggctctcttggacgcctcagagaccacctcgacaaggaagataaaggaagaggagaagagggtcaacagcaagtttgacaccatttatcagattctcctcaagaagaagagtgagatccagaccttgaaggaggagattgaacagagcctgaccaagagggatgagttcgagtttctggagaaagcatcaaaactgcgaggaatctcaacaaagccagtctacatccccgaggtggaactgaaccacaagctgataaaaggcatccaccagagcaccatagacctcaaaaacgagctgaagcagtgcatcgggcggctccaggagcccacccccagttcaggtgaccctggagagcatgacccagcgtccacacacaaatccacacgccctgtgaagaaggtctccaaagaggaaaagaaatccaagaaacctccccctgtccctgccttacccagcaagcttcccacgtttggagccccggaacagttagtggatttaaaacaagctggcttggaggctgcagccaaagccaccagctcacatccgaactcaacatctctcaaggccaaggtgctggagaccttcctggccaagtccagacctgagctcctggagtattacattaaagtcatcctggactacaacaccgcccacaacaaagtggctctgtcagagtgctatacagtagcttctgtggctgagatgcctcagaactaccggccgcatccccagaggttcacatactgctctcaggtgctgggcctgcactgctacaagaaggggatccactactgggaggtggagctgcagaagaacaacttctgtggggtaggcatctgctacggaagcatgaaccggcagggcccagaaagcaggctcggccgcaacagcgcctcctggtgcgtggagtggttcaacaccaagatctctgcctggcacaataacgtggagaaaaccctgccctccaccaaggccacgcgggtgggcgtgcttctcaactgtgaccacggctttgtcatcttcttcgctgttgccgacaaggtccacctgatgtataagttcagggtggactttactgaggctttgtacccggctttctgggtattttctgctggtgccacactctccatctgctcccccaagtag

SEQ ID NO: 252 - DNA, 1640 bp, Homo sapiens
ccggaagtgcggatcccagcggcggtcgtgtagctgagcagccctggggcttggttctatgtccctgtggctatgtttccagtgtcctctgggtgtttccaagagcaacaagaaacgaataaatctctgccccgcagcgcctccaccccagagacccggaccaagttcacacaggacaatctgtgccacgcccagcgcgagcgcctggactcggccaacctgtgggtgctggtggactgcatccttcgcgacacctccgaggacctgggactccagtgtgacgccgtgaacctggccttcgggtgccgctgtgaggaactggaggacgcgcggcacaagctgcagcaccacctgcacaagatgctgcgggaaatcacagatcaggaacacaacgtggtggcactgaaggaggccatcaaggacaaggaggaacctctgcacatagcccagacccggctgtagctgctctcacaccggcccaacatgcagctgtgccgcgatgcagcccagttcaggtactgcctgggcctctgaggcagtcccaggtgcccccatccacctcctcgctgcgaccctctccaataaacactccaatctccacacacacatcccccacaggtgctgagaggggagggagactctgcggccacacacaacatgcaagcacgccttaaacacacagatatagacatgacactgggcaggtcatgggtcgggggcctccccgtgccagggacctgtgcccacgtggtctcaccccaccctgtgctacctcatcttcccgggaggaagctccttcagacaagatgagctcctggaggccacggggccagagaggccagagagggccattccctgctgccctgagggtgctgtccccacctctggtggaaagtatgacctacgcctgggctacaggcatagatgggccgtccttttgtttcccttgttaacggatgcctggtggccccttctgagcctaagtacctttcttccttccctgcccctcagttccttcaaggaactgggtgcctccttccgtcaaatatcaggaatggaaagaactgagcctggtcggctgaggccagtcctgtcctgtcagggtcgagattgcacgcgggtcactcattcccactcaggcccgcgctccctgggaggaccctcgtaatttatgctctgccctagagccgctttcctggtaggatcctttcatggcgtcttcccaggacctcctgccagctcccattgggagttttgggtcccctccaccccagtaggtgcatacttctgccctccccagccccagctcacaccccccaacacccccaagctggtgagtgaggtggaggagctgtacaagtccatcacagcgctgcgggagaagcttctacaagcggagcagtccctgcgcaacctcaaggacatccacatgagcctggagaaggacgtcactgccatgaccaacagtctcttcatcgaccgccagaagtgcatggcccatcgtacttgctaccccaccattctgcagctggctggctaccagtgagcagcggcacggtgcttccccccaatcccccaaataaacagtgcgttagctttaaaaaaaaaaaaaaaaaaaaaaaaaaaaaaaaaaaaaaaaa

SEQ ID NO: 253 - DNA, 447 bp, Homo sapiens
cccgagcgccggccgggccatgacccccgctgctctgtcttgcaggctcgtcgccgcggccccccgagcccgaccgccgccgccaccaccaccagcgcccgggcgggcctcgcgcgcctcgggcgcggctccgcagtgagcccaccaagaaggaagcggcctgcagaggtgccgacatggggcttaagatgtcctgcctgaaaggctttcaaatgtgtgtcagcagcagcagcagcagccacgacgaggcccccgtcctgaacgacaagcacctggacgtgcccgacatcatcatcacgccccccacccccacgggcatgatgctgccgagggacttggggagcacagtctggctggatgagacagggtcgtgcccagatgatggagaaatcgacccagaagcctgaggaggtgtcctgggtttggctggctggctcctgctccagc

SEQ ID NO: 254 - DNA, 522 bp, Homo sapiens
tttttaaaaaacataagtattttatttcagaaattgtctatggtaaaatgagaaagaagtcagaaaagaattggagagatgtcaaactactatataagtcattacagaatttttaaaaaggaaaggaaagggtggatgcaagtgatctggacagcaaggcaatctaaggaaggtttggcaagaccatcagacagtcctcaggccaaagttgccattagaggagttccctgtctcccaggacagggcttccctttagctccctactgtgcttagtcagtaaccaggagcagccagtgggaggtgtgtgtcagtgcaagtgaagccgtgagttcttgaacacagcatctgtggcccatggtccattatgctccctatctctcaagttccatatggcacattctcaggactgccaacacattcttaagcactacattatattgtccacaagtctaaagtagggggaaaggacaaagataaaccagagagaccagttcctgacactaagttctaagacaaagttta

SEQ ID NO: 255 - DNA, 2583 bp, Homo sapiens
atggcgccacccagtacccgggagcccagggtcctgtcggcgaccagcgcaaccaaatccgacggagagatggtgctgccaggcttcccggacgccgacagctttgtgaagtttgctcttgggtccgtggtggcagtcaccaaggcatctgggggcctaccacagtttggcgatgagtatgatttttaccgaagttttcctggcttccaagcattttgcgaaacacagggagacaggttgcttcagtgcatgagcagagtaatgcagtaccatgggtgtcgcagcaacattaaggatcgaagtaaagtgactgagctggaagacaagtttgatttactagttgatgccaatgatgtaattctggagagagtgggtattttactggatgaagcctcaggtgtaaacaagaatcaacagcctgtcctccctgccggcttgcaggtccccaaaacggtagtgtccagctggaaccgtaaggcagcagaatatggcaaaaaagcaaaatctgaaactttccggctgcttcatgcaaaaaatatcatccgacctcagctcaagtttcgagagaagattgacaattccaacacaccatttcttcctaaaatcttcatcaaacccaatgctcagaaacctctccctcaagctctctctaaggaaaggcgggaacgcccacaggatcgtcctgaggacttggacgtcccccctgcactggctgatttcatccatcagcagagaacccagcaggttgagcaagacatgtttgcacatccttatcaatatgaactaaatcactttaccccagcagatgcagtgcttcaaaagccacaaccccagttatacagacctatagaagagacaccatgccatttcatatcctccctggatgaactcgtggaactcaacgaaaagctcttgaattgtcaggaatttgcagttgacttggagcaccactcttacaggagcttcctgggactgacctgcctgatgcaaatttctactcggacggaagacttcatcattgacaccctcgagcttcgaagtgacatgtacattctcaatgagagcctcacagacccagccatcgttaaggtctttcatggtgctgattcagacatagaatggctacagaaagactttgggttgtatgtagtaaacatgtttgatactcatcaggcagcacgccttcttaacctgggcaggcactcactcgatcatctcctgaaactctactgcaacgtggactcaaacaagcaatatcagctggctgattggagaatacgccctctgcccgaggagatgctcagctacgcccgggatgacacccattacctgctatatatctatgacaaaatgaggctggagatgtgggagcgcggcaacgggcagccggtgcagctgcaggtggtgtggcaacggagcagggacatctgcctcaagaaattcatcaaacctatcttcacggatgagtcctaccttgaactctataggaagcagaagaagcaccttaacacacagcagttgacagcctttcagctgctgtttgcctggagggataaaacagctcgcagggaagatgaaagttacggatatgtactgccaaaccacatgatgctgaaaatagctgaagaactgcctaaggaacctcagggcatcatagcttgctgcaacccagtaccgccccttgtgcggcagcagatcaacgaaatgcaccttttaatccagcaggcccgagagatgcccctgctcaagtctgaagttgcagccggagtgaagaagagcggaccgctgcccagtgctgagagattggagaatgttctctttggacctcacgactgctcccatgcccctccggatggctatccaatcatcccaaccagtggatctgtgccagttcagaagcaggcgagcctcttccctgatgaaaaagaagataacttgctgggtaccacatgcctgattgccacagctgtcatcacgttatttaatgaacctagtgctgaagacagtaaaaagggtccattgacagttgcacagaaaaaagcccagaacatcatggagtcctttgaaaatccatttaggatgatcagcaaccgctggaagctggcccaggtacaagtacaaaaagactctaaagaagctgtcaagaagaaggcagctgagcaaacagctgcccgggaacaggcaaaggaggcgtgcaaagctgcagcagaacaggccatctccgtccgacagcaggtcgtgctagaaaatgctgcaaagaagagagagcgagcaacaagcgacccaaggaccacagaacagaaacaagagaagaaacgactcaaaatttccaagaagccaaaggacccagagccaccagaaaaagagtttacgccttacgactacagccagtcagacttcaaggcttttgctggaaacagcaaatccaaagtttcttctcagtttgatccaaataaacagaccccgtctggcaagaaatgcattgcagccaaaaaaattaaacagtcggtgggaaacaaaagcatgtcctttccaactggaaagtcagacagaggcttcaggtacaactggccacagagatag

SEQ ID NO: 256 - DNA, 661 bp, Homo sapiens
  misc_feature (593)..(593): n is a, c, g, or t
ttttttttttttttttttgcagtggggcattgctgatggggccttgcaaactgtgtctgtgacctgtagggtttctcatgttctcttttcagagcaattattctccaaagctccactccccaaaatgtgtccctgcaggattcctctctctgctctgttcctcactaggttcatatctttgctatagtacttgtcacattgcattaaaacatcttttgactactctgccttgtccacgtgactgggagcctatcaaaagcagatatgttgctcattattttggattgcctaagggtctggcaactgcgtctggcatgtattgatgctcccctcctctctcctagtttgctttatatcctatgaaatgtctcatcagaatcctttaactgttattgattcaagtctctacccagttttgtgacagcaatttagcactttgatctctcaccccattttgcttctgttattaaatttatttttccatgaatttctacttcaagtcggaaagatgaagaagaaaaattctgggctgtgaagtcactagccagctgtgtggcaatggacatctttacccactctgagctcatcagtcnccttatttatatttctaaggagagggagtgggaggagaagagaagggaagagaaagtaggaaagaaaa

SEQ ID NO: 257 - DNA, 5421 bp, Homo sapiens
atggagccgtggtcctctaggtggaaaacgaaacggtggctctgggatttcaccgtaacaaccctcgcattgaccttcctcttccaagctagagaggtcagaggagctgctccagttgatgtactaaaagcactagattttcacaattctccagagggaatatcaaaaacaacgggattttgcacaaacagaaagaattctaaaggctcagatactgcttacagagtttcaaagcaagcacaactcagtgccccaacaaaacagttatttccaggtggaactttcccagaagacttttcaatactatttacagtaaaaccaaaaaaaggaattcagtctttccttttatctatatataatgagcatggtattcagcaaattggtgttgaggttgggagatcacctgtttttctgtttgaagaccacactggaaaacctgccccagaagactatcccctcttcagaactgttaacatcgctgacgggaagtggcatcgggtagcaatcagcgtggagaagaaaactgtgacaatgattgttgattgtaagaagaaaaccacgaaaccacttgatagaagtgagagagcaattgttgataccaatggaatcacggtttttggaacaaggattttggatgaagaagtttttgagggggacattcagcagtttttgatcacaggtgatcccaaggcagcatatgactactgtgagcattatagtccagactgtgactcttcagcacccaaggctgctcaagctcaggaacctcagatagatgagtatgcaccagaggatataatcgaatatgactatgagtatggggaagcagagtataaagaggctgaaagtgtaacagagggacccactgtaactgaggagacaatagcacagacggaggcaaacatcgttgatgattttcaagaatacaactatggaacaatggaaagttaccagacagaagctcctaggcatgtttctgggacaaatgagccaaatccagttgaagaaatatttactgaagaatatctaacgggagaggattatgattcccagaggaaaaattctgaggatacactatatgaaaacaaagaaatagacggcagggattctgatcttctggtagatggagatttaggcgaatatgatttttatgaatataaagaatatgaagataaaccaacaagcccccctaatgaagaatttggtccaggtgtaccagcagaaactgatattacagaaacaagcataaatggccatggtgcatatggagagaaaggacagaaaggagaaccagcagtggttgagcctggtatgcttgtcgaaggaccaccaggaccagcaggacctgcaggtattatgggtcctccaggtctacaaggccccactggaccccctggtgaccctggcgataggggccccccaggacgtcctggcttaccaggggctgatggtctacctggtcctcctggtactatgttgatgttaccgttccgttatggtggtgatggttccaaaggaccaaccatctctgctcaggaagctcaggctcaagctattcttcagcaggctcggattgctctgagaggcccacctggcccaatgggtctaactggaagaccaggtcctgtgggggggcctggttcatctggggccaaaggtgagagtggtgatccaggtcctcagggccctcgaggcgtccagggtccccctggtccaacgggaaaacctggaaaaaggggtcgtccaggtgcagatggaggaagaggaatgccaggagaacctggggcaaagggagatcgagggtttgatggacttccgggtctgccaggtgacaaaggtcacaggggtgaacgaggtcctcaaggtcctccaggtcctcctggtgatgatggaatgaggggagaagatggagaaattggaccaagaggtcttccaggtgaagctggcccacgaggtttgctgggtccaaggggaactccaggagctccagggcagcctggtatggcaggtgtagatggccccccaggaccaaaagggaacatgggtccccaaggggagcctgggcctccaggtcaacaagggaatccaggacctcagggtcttcctggtccacaaggtccaattggtcctcctggtgaaaaaggaccacaaggaaaaccaggacttgctggacttcctggtgctgatgggcctcctggtcatcctgggaaagaaggccagtctggagaaaagggggctctgggtccccctggtccacaaggtcctattggatacccgggcccccggggagtaaagggagcagatggtgtcagaggtctcaagggatctaaaggtgaaaagggtgaagatggttttccaggattcaaaggtgacatgggtctaaaaggtgacagaggagaagttggtcaaattggcccaagaggggaagatggccctgaaggacccaaaggtcgagcaggcccaactggagacccaggtccttcaggtcaagcaggagaaaagggaaaacttggagttccaggattaccaggatatccaggaagacaaggtccaaagggttccactggattccctgggtttccaggtgccaatggagagaaaggtgcacggggagtagctggcaaaccaggccctcggggtcagcgtggtccaacgggtcctcgaggttcaagaggtgcaagaggtcccactgggaaacctgggccaaagggcacttcaggtggcgatggccctcctggccctccaggtgaaagaggtcctcaaggacctcagggtccagttggattccctggaccaaaaggccctcctggaccacctgggaaggatgggctgccaggacaccctgggcaacgtggggagactggatttcaaggcaagaccggccctcctgggccagggggagtggttggaccacagggaccaaccggtgagactggtccaataggggaacgtgggcatcctggccctcctggccctcctggtgagcaaggtcttcctggtgctgcaggaaaagaaggtgcaaagggtgatccaggtcctcaaggtatctcagggaaagatggaccagcaggattacgtggtttcccaggggaaagaggtcttcctggagctcagggtgcacctggactgaaaggaggggaaggtccccagggcccaccaggtccagttggctcaccaggagaacgtgggtcagcaggtacagctggcccaattggtttaccagggcgcccgggacctcagggtcctcctggtccagctggagagaaaggtgctcctggagaaaaaggtccccaagggcctgcagggagagatggagttcaaggtcctgttggtctcccagggccagctggtcctgccggctcccctggggaagacggagacaagggtgaaattggtgagccgggacaaaaaggcagcaagggtgacaagggagaaaatggccctcccggtcccccaggtcttcaaggaccagttggtgcccctggaattgctggaggtgatggtgaaccaggtcctagaggacagcaggggatgtttgggcaaaaaggtgatgagggtgccagaggcttccctggacctcctggtccaataggtcttcagggtctgccaggcccacctggtgaaaaaggtgaaaatggggatgttggtcccatggggccacctggtcctccaggcccaagaggccctcaaggtcccaatggagctgatggaccacaaggacccccagggtctgttggttcagttggtggtgttggagaaaagggtgaacctggagaagcagggaacccagggcctcctggggaagcaggtgtaggcggtcccaaaggagaaagaggagagaaaggggaagctggtccacctggagctgctggacctccaggtgccaaggggccaccaggtgatgatggccctaagggtaacccgggtcctgttggttttcctggagatcctggtcctcctggggaacctggccctgcaggtcaagatggtgttggtggtgacaagggtgaagatggagatcctggtcaaccgggtcctcctggcccatctggtgaggctggcccaccaggtcctcctggaaaacgaggtcctcctggagctgcaggtgcagagggaagacaaggtgaaaaaggtgctaagggggaagcaggtgcagaaggtcctcctggaaaaaccggcccagtcggtcctcagggacctgcaggaaagcctggtccagaaggtcttcggggcatccctggtcctgtgggagaacaaggtctccctggagctgcaggccaagatggaccacctggtcctatgggacctcctggcttacctggtctcaaaggtgaccctggctccaagggtgaaaagggacatcctggtttaattggcctgattggtcctccaggagaacaaggggaaaaaggtgaccgagggctccctggaactcaaggatctccaggagcaaaaggggatgggggaattcctggtcctgctggtcccttaggtccacctggtcctccaggtttaccaggtcctcaaggcccaaagggtaacaaaggctctactggacccgctggccagaaaggtgacagtggtcttccagggcctcctgggtctccaggtccacctggtgaagtcattcagcctttaccaatcttgtcctccaaaaaaacgagaagacatactgaaggcatgcaagcagatgcagatgataatattcttgattactcggatggaatggaagaaatatttggttccctcaattccctgaaacaagacattgagcatatgaaatttccaatgggtactcagaccaatccagcccgaacttgtaaagacctgcaactcagccatcctgacttcccagatggtgaatattggattgatcctaaccaaggttgctcaggagattccttcaaagtttactgtaatttcacatctggtggtgagacttgcatttatccagacaaaaaatctgagggagtaagaatttcatcatggccaaaggagaaaccaggaagttggtttagtgaatttaagaggggaaaactgctttcatacttagatgttgaaggaaattccatcaatatggtgcaaatgacattcctgaaacttctgactgcctctgctcggcaaaatttcacctaccactgtcatcagtcagcagcctggtatgatgtgtcatcaggaagttatgacaaagcacttcgcttcctgggatcaaatgatgaggagatgtcctatgacaataatccttttatcaaaacactgtatgatggttgtgcgtccagaaaaggctatgaaaagactgtcattgaaatcaatacaccaaaaattgatcaagtacctattgttgatgtcatgatcaatgactttggtgatcagaatcagaagttcggatttgaagttggtcctgtttgttttcttggctaa

SEQ ID NO: 258 - DNA, 1437 bp, Homo sapiens
atgggctctcgctggagcagcgaagaggagaggcagccgctgctggggcccgggctcgggcctgggctgggggcctcctggagaagccgggaggcggcggcggcggcgctgcccgcggcggtcccgggtcccgggcgggtatacgggcgccgctggctggtgctgctgctcttctcgctgctggcgttcgttcagggcctggtctggaacacctggggtcccatccagaactcggcgcgccaggcctacggcttctccagctgggacatcgcgctgctcgtgctgtgggggcccatcggcttcctgccctgcttcgcgttcatgtggctcctggacaagagaggtctccggataactgtgctcctgacatccttccttatggttttgggaactggtctaagatgcatacctatatcagacttaatccttaaaagaagattaattcatggaggacagatgttaaatggattggcaggtccaactgtaatgaatgcagcaccatttctctctacgacgtggttttctgcagatgaaagggccacagccacagctattgcatcaatgctcagttatcttgggggagcatgtgcatttttagttggaccacttgttgttccagctcccaatgggacatcacctcttcttgctgcagagagcagcagggcgcatattaaagatcgcatagaggctgtgttatatgcagaatttggagttgtctgcttaatattttctgcaacactagcttatttcccaccccgacctcctcttcctcccagtgttgctgcagctagccagcggctgagttatcggagaagcgtttgtagattattaagcaattttcgatttttgatgattgctttagcatatgccataccacttggtgtatttgctggctggtctggagttctggacttaattttaacaccagcgcatgtcagccaagtagatgctggctggattggattttggtccatagttggaggctgtgttgttggaatagctatggcaaggtttgcagattttatcaggggtatgctgaaactaattcttctcctcctgttttcgggagctacactgtcatccacgtggttcaccctgacctgtttgaacagcatcacacacctacctttaaccacagtgacattgtatgcctcctgtattctcctgggagtgttcttgaatagcagcgtgcctatattttttgagctttttgtggaaactgtctacccagttccagaaggaattacttgtggagttgtcacttttttaagtaatatgtttatgggagtacttttattttttctcacattttatcatacagagttgtcttggttcaactggtgccttcccgggtcgtgtttgctcagtctcctcctcattctgtgcttcagggaatcctatgacagactctatcttgatgtggttgtctccgtttaa

SEQ ID NO: 259 - DNA, 1764 bp, Homo sapiens
atggcctcggaagacattgccaagctggcagagacacttgccaagactcaggtggccgggggacagctgagtttcaaaggcaagagcctcaaactcaacactgcagaagatgctaaagatgtgattaaagagattgaagactttgacagcttggaggctctgcgtctggaaggcaacacagtgggcgtggaagcagccagggtcatcgccaaggccttagagaagaagtcggagttgaagcgctgccactggagtgacatgttcacgggaaggctgcggaccgagatcccaccagccctgatctcactaggggaaggactcatcacagctggggctcagctggtggagctggacttaagcgacaacgcattcgggcccgacggtgtgcaaggcttcgaggccctgctcaagagctcagcctgcttcaccctgcaggaactcaagctcaacaactgtggcatgggcattggcggcggcaagatcctggctgcagctctgaccgaatgtcaccggaaatccagtgcccaaggcaagcctctggccctgaaggtctttgtggctggcagaaaccgtctggagaatgatggcgccactgccttggcagaagcttttagggtcatcgggaccctggaggaggtccacatgccacagaatgggatcaaccaccctggcatcactgccctggcccaggctttcgctgtcaaccccctgctgcgggtcatcaacctgaatgacaacaccttcactgagaagggcgccgtggccatggccgagaccttgaagaccttgcggcaggtggaggtgattaattttggggactgcctggtgcgctccaagggtgcagttgccattgcagatgccatccgcggcggcctgcccaagctaaaggagctgaacttgtcattctgtgaaatcaagagggatgctgccctggctgttgctgaggccatggcagacaaagctgagctggagaagctggacctgaatggcaacaccctgggagaagaaggctgtgaacagcttcaggaggtgctggagggcttcaacatggccaaggtgctggcgtccctcagtgatgacgaggacgaggaggaggaggaggaaggagaagaggaagaagaggaagcagaagaagaggaggaggaagatgaggaagaggaggaagaagaggaggaggaggaggaagaagagcctcagcagcgagggcagggagagaagtcagccacgccctcacggaagattctggaccctaacactggggagccagctcccgtgctgtcctccccacctcctgcagacgtctccaccttcctggcttttccctctccagagaagctgctgcgcctagggcccaagagctccgtgctgatagcccagcagactgacacgtctgaccccgagaaggtggtctctgccttcctaaaggtgtcatctgtgttcaaggacgaagctactgtgaggatggcagtgcaggatgcagtagatgccctgatgcagaaggctttcaactcctcgtccttcaactccaacaccttcctcaccaggctgctcgtgcacatgggtctgctcaagagtgaagacaaggtcaaggccattgccaacctgtacggccccctgatggcgctgaaccacatggtgcagcaggactatttccccaaggcccttgcacccctgctgctggcgttcgtgaccaagcccaacagcgccctggaatcctgctccttcgcccgccacagtctgctgcagacgctgtacaaggtctag

SEQ ID NO: 260 - DNA, 1515 bp, Homo sapiens
atgctgtacttctctttgttttgggcggctcggcctctgcagagatgtgggcagctggtcaggatggccattcgggctcagcacagcaacgcagcccagactcagactggggaagcaaacaggggctggacaggccaggagagcctgtcggacagtgatcctgagatgtgggagttgctgcagagggagaaggacaggcagtgtcgtggcctggagctcattgcctcagagaacttctgcagccgagctgcgctggaggccctggggtcctgtctgaacaacaagtactcggagggttatcctggcaagagatactatgggggagcagaggtggtggatgaaattgagctgctgtgccagcgccgggccttggaagcctttgacctggatcctgcacagtggggagtcaatgtccagccctactccgggtccccagccaacctggccgtctacacagcccttctgcaacctcacgaccggatcatggggctggacctgcccgatgggggccatctcacccacggctacatgtctgacgtcaagcggatatcagccacgtccatcttcttcgagtctatgccctataagctcaaccccaaaactggcctcattgactacaaccagctggcactgactgctcgacttttccggccacggctcatcatagctggcaccagcgcctatgctcgcctcattgactacgcccgcatgagagaggtgtgtgatgaagtcaaagcacacctgctggcagacatggcccacatcagtggcctggtggctgccaaggtgattccctcgcctttcaagcacgcggacatcgtcaccaccactactcacaagactcttcgaggggccaggtcagggctcatcttctaccggaaaggggtgaaggctgtggaccccaagactggccgggagatcccttacacatttgaggaccgaatcaactttgccgtgttcccatccctgcaggggggcccccacaatcatgccattgctgcagtagctgtggccctaaagcaggcctgcacccccatgttccgggagtactccctgcaggttctgaagaatgctcgggccatggcagatgccctgctagagcgaggctactcactggtatcaggtggtactgacaaccacctggtgctggtggacctgcggcccaagggcctggatggagctcgggctgagcgggtgctagagcttgtatccatcactgccaacaagaacacctgtcctggagaccgaagtgccatcacaccgggcggcctgcggcttggggccccagccttaacttctcgacagttccgtgaggatgacttccggagagttgtggactttatagatgaaggggtcaacattggcttagaggtgaagagcaagactgccaagctccaggatttcaaatccttcctgcttaaggactcagaaacaagtcagcgtctggccaacctcaggcaacgggtggagcagtttgccagggccttccccatgcctggttttgatgagcattga

SEQ ID NO: 261 - DNA, 1179 bp, Homo sapiens
atggaggccccactggtgagtctggatgaagagtttgaggaccttcgaccctcctgctcggaggacccggaggagaagccccagtgtttctatggttcatctccccaccatctcgaggacccctccctctccgagcttgagaatttttcttccgaaataatcagcttcaagtccatggaggacctcgtaaatgaatttgatgagaagctcaatgtctgctttcggaactacaacgccaagaccgagaacctagctcccgtgaagaaccagttacagatccaagaggaggaggagacccttcaggacgaggaggtttgggatgctctgacagacaattacatcccttcactctcagaagactggagggatccaaacatcgaggctctgaatggcaactgctctgacactgagatccatgagaaagaagaggaagagttcaatgagaagagtgaaaatgattccggtatcaacgaggagcctctgctcacagcagatcaggtaattgaggagattgaggaaatgatgcagaactccccagaccctgaggaagaagaggaggttctggaagaagaggatggaggagaaacttcctcccaggcagactcggtcctcctgcaggagatgcaggcattgacacagaccttcaacaacaactggtcctatgaagggctgaggcacatgtctgggtctgagctgaccgagctgctggaccaggtggagggtgccatccgtgacttctcggaggagctggtgcagcagctggcccgccgggacgagctggagtttgagaaggaagtgaagaactcctttatcacggtgcttattgaggttcagaacaagcagaaggagcagcgagaactgatgaaaaagaggcggaaagagaaagggctgagcctgcagagcagccggatagagaagggaaaccagatgcctctcaagcgcttcagcatggaaggcatctccaacattctgcagagtggcatccgccagacctttggctcctcaggaactgacaaacagtatctgaacacagtcattccttacgagaagaaagcctctcctccctcagtggaagacctgcagatgctgacaaacattctctttgccatgaaggaggataatgagaaggtgcctactttgctaacggactacattttaaaagtgctctgccctacctaa

SEQ ID NO: 262 - DNA, 3004 bp, Homo sapiens
gccacgcgtgcgcttaggcgccgctgagcgctgactgggtgcgagtggggaagctgctaacccgacccggattggcgctgaggtggcccgtggggcagggcagatgattctggaccagatgaagcctgaggagccttccagctctaagatagcaggataggagacttctaagattggagctgcagaagacttgccagcccaccagcacaatgtcaggaagccatacacctgcctgtggccctttctcagccctgactccgagcatatggccccaggagatcttggccaagtacacgcagaaggaagagtcagcagagcaaccagagttctactacgatgagtttggtttccgtgtgtacaaggaagaaggtgatgagcctggctccagtctgctggcgaactcccctctgatggaggatgctccacagaggctgcggtggcaggcccacctggagttcacccataaccacgatgtgggggatctcacctgggacaagattgccgtctccctaccccgctctgagaagctccgctccctggtgctggccggcatcccacatggcatgaggccacagctgtggatgcggctctctggggccctgcagaagaagaggaactctgagctgtcctaccgcgagattgtgaagaacagctccaacgatgagaccatcgctgccaagcagatcgagaaggacctgctccgcaccatgcccagcaacgcctgcttcgccagcatgggtagcatcggggtgccccgcctgcgcagggtgctccgggccctggcctggctctacccagagatcggctactgccagggcaccggcatggtggccgcctgcctcctgctgttcctggaggaggaggacgccttctggatgatgtctgccatcatcgaggacctgctccccgcctcctacttcagcaccaccctgctgggtgtccagactgaccagcgggtcctgcgccacctcattgtccagtacctgcctcgcctggacaagctgctccaggagcatgacattgagctgtccctgatcacactgcactggttcctcacggccttcgccagcgtggtggacatcaagctgctcctgcgcatctgggacctgtttttctacgagggctcccgggtgctgttccagctcacgctgggcatgctgcacctcaaggaggaagagctgatccagtcagagaactcggcctccatcttcaacacgctatcggatatcccgtcgcagatggaggacgcggagctgcttctgggggtggccatgcggctggccggctccctcaccgatgtggccgtggagactcagcgccgcaagcacctggcctatctcattgcagaccagggccagctcctgggggccggcaccctcaccaacctctctcaggttgttcgccgcaggacccagcggaggaagtccaccatcactgctctgctcttcggggaggatgacctggaggcactcaaggccaagaacatcaagcagacggaactggtggctgacctccgggaagccatcctgcgcgtggcacgccacttccagtgcacagaccccaaaaactgcagcgtggagctgactccagactatagcatggagagccaccagcgggaccacgagaactacgtggcgtgctcacgcagccaccggcgccgagccaaggccctgctggactttgagcggcacgacgacgacgagctgggcttccgcaagaacgacatcatcacaatcgtgtctcagaaggacgagcactgctgggtgggggagctcaacggcctgcgaggctggtttccagccaagttcgtggaagtcctggatgagcgcagcaaagagtactccatcgcgggggatgactcggtgacggagggggtcacagacctcgtgcgagggaccctctgcccggcccttaaggccctgttcgaacatggactgaagaagccatccctgcttgggggcgcctgccacccctggctgtttatcgaggaggctgcaggccgggaggtcgagagagactttgcctccgtgtattcccgtctggtgctctgtaagaccttcaggttggatgaagatggcaaagtcctgaccccggaggagctgctctaccgggctgtgcagtctgtgaacgtgacccacgatgcagtgcatgcacaaatggatgtgaagctccgctcactgatctgcgtggggctcaatgagcaggtgctgcacctgtggctggaggtgctctgctccagcctgcccaccgtggagaagtggtaccagccctggtccttcctgcgcagcccgggctgggtccagatcaagtgtgagctccgagtcctctgctgctttgccttcagcctctcccaggactgggagctccctgcgaagagagaggcgcagcagcccctgaaggagggcgtccgggacatgctggtgaagcaccacctcttcagctgggatgtggacgggtgaccccctcctccccagcccaacctcgggcctgcgtctgaggtggcccaggaccccaagctgcagagcccagggaagagcagctccagagccctggccggggccgcgggatatcaatatcaggctgccccactccacgttccccagcacatcccaggtggtgggagcagagggtaccctgccccaccagggtccttagggatgctctaggccaaaccacagtttgtaccaaaaaccttgtgaggaggtgggggagccatgtctgtgctcaggaagagggaaggggatgggggtggctagtaggctcctggcctctttggtttataaataaactgtgtctgtctttgagaaagcacctacctgtcttctgtgcagctagggctgcagagctgtattcaggtccaaggttctgcccttccttgagtggtctagaaggcactgcgtggcccctcagatgctgggacacaacagacccgggacccagctgtgctacccaccccttccatggactgaataagatggactaacaggccaaaaaaaaaaaaaaa

SEQ ID NO: 263 - DNA, 1344 bp, Homo sapiens
atgatgctagccttcttggttctcagcactggcatgttttgctcatcatcagcattccttcctagtagcttctgtatgtacactacgttgatagccatgactggatggtatatggacaagacttccattgctgtgctgggagtagcagctggggctatcttaggctggccattcagtgcagctcttggtttacccattgcctttgatttgctggtcatgaaacacaggtggaagagtttctttcattggtcgctgatggccctcatactatttctggtgcctgtggtggtcattgacagctactattatgggaagttggtgattgcaccactcaacattgttttgtataatgtctttactcctcatggacctgatctttatggtacagaaccctggtatttctatttaattaatggatttctgaatttcaatgtagcctttgctttggctctcctagtcctaccactgacttctcttatggaatacctgctgcagagatttcatgttcagaatttaggccacccgtattggcttaccttggctccaatgtatatttggtttataattttcttcatccagcctcacaaagaggagagatttcttttccctgtgtatccacttatatgtctctgtggcgctgtggctctctctgcacttcagcacagttttctgtacttccagaaatgttaccactttgtgtttcaacgatatcgcctggagcactatactgtgacatcgaattggctggcattaggaactgtcttcctgtttgggctcttgtcattttctcgctctgtggcactgttcagaggatatcacgggccccttgatttgtatccagaattttaccgaattgctacagacccaaccatccacactgtcccagaaggcagacctgtgaatgtctgtgtgggaaaagagtggtatcgatttcccagcagcttccttcttcctgacaattggcagcttcagttcattccatcagagttcagaggtcagttaccaaaaccttttgcagaaggacctctggccacccggattgttcctactgacatgaatgaccagaatctagaagagccatccagatatattgatatcagtaaatgccattatttagtggatttggacaccatgagagaaacaccccgggagccaaaatattcatccaataaagaagaatggatcagcttggcctatagaccattccttgatgcttctagatcttcaaagctgctgcgggcattctatgtccccttcctgtcagatcagtatacagtgtacgtaaactacaccatcctcaaaccccggaaagcaaagcaaatcaggaagaaaagtggaggttag

SEQ ID NO: 264 - DNA, 735 bp, Homo sapiens
atggagctgttcctcgcgggccgccgggtgctggtcaccggggcaggcaaaggtatagggcgcggcacggtccaggcgctgcacgcgacgggcgcgcgggtggtggctgtgagccggactcaggcggatcttgacagccttgtccgcgagtgcccggggatagaacccgtgtgcgtggacctgggtgactgggaggccaccgagcgggcgctgggcagcgtgggccccgtggacctgctggtgaacaacgccgctgtcgccctgctgcagcccttcctggaggtcaccaaggaggcctttgacagatcctttgaggtgaacctgcgtgcggtcatccaggtgtcgcagattgtggccaggggcttaatagcccggggagtcccaggggccatcgtgaatgtctccagccagtgctcccagcgggcagtaactaaccatagcgtctactgctccaccaagggtgccctggacatgctgaccaaggtgatggccctagagctcgggccccacaagatccgagtgaatgcagtaaaccccacagtggtgatgacgtccatgggccaggccacctggagtgacccccacaaggccaagactatgctgaaccgaatcccacttggcaagtttgctgaggtagagcacgtggtgaacgccatcctctttctgctgagtgaccgaagtggcatgaccacgggttccactttgccggtggaagggggcttctgggcctgctga

SEQ ID NO: 265 - DNA, 714 bp, Homo sapiens
atgtcggacagtgatctaggtgaggacgaaggcctcctctccctggcgggcaaaaggaagcgcagggggaacctgcccaaggagtcggtgaagatcctccgggactggctgtacttgcaccgctacaacgcctacccctcagagcaggagaagctgagcctttctggacagaccaacctgtcagtgctgcaaatatgtaactggttcatcaatgcccggcggcggcttctcccagacatgcttcggaaggatggcaaagaccctaatcagtttaccatttcccgccgcgggggtaaggcctcagatgtggccctcccccgtggcagcagcccctcagtgctggctgtgtctgtcccagcccccaccaatgtgctctccctgtctgtgtgctccatgccgcttcactcaggccagggggaaaagccagcagcccctttcccacgtggggagctggagtctcccaagcccctggtgacccctggtagcacacttactctgctgaccagggctgaggctggaagccccacaggtggactcttcaacacgccaccacccacacccccagagcaggacaaagaggacttcagcagcttccagctgctggtggaggtggcgctacagagggctgctgagatggagcttcagaagcagcaggacccatcactcccattactgcacactcccatccctttagtctctgaaaatccccagtag

SEQ ID NO: 266 - DNA, 1968 bp, Homo sapiens
atggccaaaggtggagaagccctgccacagggcagcccagcaccagtccaggatccccacctcatcaaggtgacagtgaagacgcccaaagacaaggaggatttctcagttacagacacatgcactatccagcagctgaaggaagagatatctcagcgctttaaggcccaccccgatcagcttgttctaatctttgctggcaaaatcctcaaggatcctgactcactggcacagtgtggagtgcgagatggcctcactgtccacctggtcatcaagaggcagcaccgtgccatgggcaatgagtgcccagctgcctctgtccctacccagggcccaagtcctggatcactccctcagccaagctccatttacccagcagatgggccccctgcctttagcttaggtctcctcacaggcctcagtaggctgggcttggcctatcgtggcttccctgaccagccaagctccctgatgcggcagcatgtgtctgtgcctgagtttgtgactcagctcattgatgaccccttcatcccgggtctgctgtccaacacaggcctagtacgccagctggttcttgacaacccccatatgcagcagctgatccagcacaaccctgagattgggcatattcttaacaacccggaaattatgcggcagacactggagtttttacgtaaccctgccatgatgcaggagatgatacgtagccaggaccgggtgctcagtaacttggagagcattcctggtggctacaatgtgctttgcactatgtacacagatattatggacccaatgcttaacgcagtccaggagcagtttggcggcaatccctttgccactgccactactgataatgccaccaccaccaccagccaaccttcaaggatggagaattgtgaccctctccccaacccctggacttccacacatggaggctcaggtagcaggcaaggaaggcaggatggggatcaggatgcacctgacattagaaataggtttccaaactttctgggtattataaggctctatgactatctccagcaattacacgagaacccccagtccctaggaacttatctacaggggactgcatctgccctcagccaaagccaggaaccaccaccatcagtaaacagagttcccccatcgtcaccctcatctcaggagcctgggtcaggccagcctctccccgaggagtcagtagcaatcaagggaaggtcctcctgcccagctttcctgagataccccacagagaacagtactggacaaggtggagaccaagatggtgcagggaaaagctctactggacatagcacaaacttgcctgatcttgtctcggggctgggagattctgccaacagggttccatttgctcccttatctttttcccccacggcagccattcctggaatccctgagcctccctggctgccatccccggcttatccaagatctctgaggccagatggcatgaatccagctccacagttacaggatgagatacaaccacagctgccactgctgatgcaccttcaggcagccatggcaaacccccgtgccctgcaagccctgcggcagattgagcagggtctacaggtcctagctactgaagcacctcgcctcctactctggttcatgccttgcctagcagggacgggtagtgtggcaggaggtatagagtctagagaagatccccttatgtctgaggatcctctcccaaatccacctcctgaggtgttcccagcactggactctgcagagctgggcttcctttcccctccctttctccatatgctgcaagatttagttagtacaaatccccagcagctgcagcctgaggctcactttcaggtgcagctggagcaactgcggtccatgggctttctgaatcgtgaagccaatcttcaggccctcattgctacggggggcgacgtggatgctgctgtggagaagctgagacagtcgtag

SEQ ID NO: 267 - DNA, 1089 bp, Homo sapiens
atgtcgggctaccagcgccgcccgggcgccaccccgctgtcccgagcccggagcctcgccattcccgacgatgacagatttgaagatctggaagaggcaaatccattctcttttagagagtttctgaagaccaagaacctcggcctctcgaaagaggatccggccagcagaatttatgcaaaggaagcctcgaggcattccctgggacttgaccacaactccccaccctcccaaaccggcgggtatggcctggagtatcagcagccatttttcgaggatccgacaggggctggtgacctcctggatgaggaggaggatgaggacaccggatggagtggggcctacctgccgtccgccatcgagcagactcaccccgagagggtccctgccggcacgtcgccctgcagcacatacctttcctttttctccaccccgtcggagctggcagggcctgagtctctgccctcgtgggcgttgagtgacactgattctcgcgtgtctccggcctctccggcagggagtcctagcgcagactttgcggttcatggagagtctctgggagacaggcacctgcggacgctgcagataagttacgacgcactgaaagatgaaaattctaagctgagaagaaagctgaatgaggttcagagcttctctgaagctcaaacagaaatggtgaggacgcttgagcggaagttagaagcaaaaatgatcaaggaggaaagcgactaccacgacctggagtcggtggttcagcaggtggagcagaacctggagctgatgaccaaacgggctgtaaaggcagaaaaccacgtcgtgaaactaaaacaggaaatcagtttgctccaggcgcaggtctccaacttccagcgagagaatgaagccctgcggtgcggccagggtgccagcctgaccgtggtgaagcagaacgccgacgtggccctgcagaacctccgggtggtcatgaacagtgcacaggcttccatcaagcaactggtttccggagctgagacactgaatcttgttgccgaaatccttaaatctatagacagaatttctgaagttaaagacgaggaggaagactcttga

SEQ ID NO: 268 - DNA, 540 bp, Homo sapiens
atggcttcccaaaaccgcgacccagccgccactagcgtcgccgccgcccgtaaaggagctgagccgagcgggggcgccgcccggggtccggtgggcaaaaggctacagcaggagctgatgaccctcatgatgtctggcgataaagggatttctgccttccctgaatcagacaaccttttcaaatgggtagggaccatccatggagcagctggaacagtatatgaagacctgaggtataagctctcgctagagttccccagtggctacccttacaatgcgcccacagtgaagttcctcacgccctgctatcaccccaacgtggacacccagggtaacatatgcctggacatcctgaaggaaaagtggtctgccctgtatgatgtcaggaccattctgctctccatccagagccttctaggagaacccaacattgatagtcccttgaacacacatgctgccgagctctggaaaaaccccacagcttttaagaagtacctgcaagaaacctactcaaagcaggtcaccagccaggagccctga

SEQ ID NO: 269 - DNA, 1128 bp, Homo sapiens
atggatgccattcacatcggcatgtccagcacccccctggtgaagcacactgctggggctgggctcaaggccaacagaccccgcgtcatgtccaagagtgggcacagcaacgtgagaattgacaaagtggatggcatatacctactctacctgcaagacctgtggaccacagttatcgacatgaagtggagatacaaactcaccctgttcgctgccacttttgtgatgacctggttcctttttggagtcatctactatgccatcgcgtttattcatggggacttagaacccggtgagcccatttcaaatcataccccctgcatcatgaaagtggactctctcactggggcgtttctcttttccctggaatcccagacaaccattggctatggagtccgttccatcacagaggaatgtcctcatgccatcttcctgttggttgctcagttggtcatcacgaccttgattgagatcttcatcaccggaaccttcctggccaaaatcgccagacccaaaaagcgggctgagaccatcaagttcagccactgtgcagtcatcaccaagcagaatgggaagctgtgcttggtgattcaggtagccaatatgaggaagagcctcttgattcagtgccagctctctggcaagctcctgcagacccacgtcaccaaggagggggagcggattctcctcaaccaagccactgtcaaattccacgtggactcctcctctgagagccccttcctcattctgcccatgacattctaccatgtgctggatgagacgagccccctgagagacctcacaccccaaaacctaaaggagaaggagtttgagcttgtggtcctcctcaatgccactgtggaatccaccagcgctgtctgccagagccgaacatcttatatcccagaggaaatctactggggttttgagtttgtgcctgtggtatctctctccaaaaatggaaaatatgtggctgatttcagtcagtttgaacagattcggaaaagcccagattgcacattttactgtgcagattctgagaaacagcaactcgaggagaagtacaggcaggaggatcagagggaaagagaactgaggacacttttattacaacagagcaatgtctga

SEQ ID NO: 270 - DNA, 1032 bp, Homo sapiens
atggacggccgccgtgttttgggccggttctggagtggctggcggcggggcctgggtgtccgcccagtgcccgaggacgcaggctttggcaccgaagcccggcatcagaggcaaccccgcggctcctgccaacggtcggggcccctcggggaccagcccttcgcggggctgctgccaaaaaacctcagtcgggaggagctggttgatgcgctgcgggcagccgtggtggaccggaaaggacctctagtgacgttgaacaagccacagggtctaccagtgacaggaaaaccaggagagctgacgttgttctcagtgctgccagagctgagccagtccctagggctcagggagcaggagcttcaggttgtccgagcatctgggaaagaaagctctgggcttgtactcctctccagctgtccccagacagctagtcgcctccagaagtacttcacccatgcacggagagcccaaaggcccacagccacctactgtgctgtcactgatgggatcccagctgcttctgaggggaagatccaggctgccctgaaactggaacacattgatggggtcaatctcacagttccagtgaaggccccatcccgaaaggacatcctggaaggtgtcaagaagactctcagtcactttcgtgtggtagccacaggctctggctgtgccctggtccagctgcagccactgacagtgttctccagtcaactacaggtgcacatggtactacagctctgccctgtgcttggggaccacatgtactctgcccgtgtgggcactgtcctgggccagcgatttctgctgccagctgagaacaacaagccccaaagacaggtcctggatgaagccctcctcagacgcctccacctgaccccctcccaggctgcccagctgcccttgcacctccacctacatcggctccttctcccaggcaccagggccagggacacccctgttgagctcctggcaccactgcccccttatttctccaggaccctacagtgcctggggctccgcttacaatag

SEQ ID NO: 271 - DNA, 1044 bp, Homo sapiens
atggagtcgcccgcctcgagccagcccgccagcatgccccagtccaaaggaaaatccaagaggaagaaggatctacggatatcctgcatgtccaagccacccgcacccaaccccacacccccccggaacctggactcccggaccttcatcaccattggagacagaaactttgaggtggaggctgatgacttggtgaccatctcagaactgggccgtggagcctatggggtggtagagaaggtgcggcacgcccagagcggcaccatcatggccgtgaagcggatccgggccaccgtgaactcacaggagcagaagcggctgctcatggacctggacatcaacatgcgcacggtcgactgtttctacactgtcaccttctacggggcactattcagagagggagacgtgtggatctgcatggagctcatggacacatccttggacaagttctaccggaaggtgctggataaaaacatgacaattccagaggacatccttggggagattgctgtgtctatcgtgcgggccctggagcatctgcacagcaagctgtcggtgatccacagagatgtgaagccctccaatgtccttatcaacaaggagggccatgtgaagatgtgtgactttggcatcagtggctacttggtggactctgtggccaagacgatggatgccggctgcaagccctacatggcccctgagaggatcaacccagagctgaaccagaagggctacaatgtcaagtccgacgtctggagcctgggcatcaccatgattgagatggccatcctgcggttcccttacgagtcctgggggaccccgttccagcagctgaagcaggtggtggaggagccgtccccccagctcccagccgaccgtttctcccccgagtttgtggacttcactgctcagtgcctgaggaagaaccccgcagagcgtatgagctacctggagctgatggagcaccccttcttcaccttgcacaaaaccaagaagacggacattgctgccttcgtgaaggagatcctgggagaagactcatag

SEQ ID NO: 272 - DNA, 3074 bp, Homo sapiens
ccgctctccgctgcgggggaggccatggcggaaccttcccaggccccgaccccggccccggctgcgcagccccggccccttcagtccccagcccctgccccaactccgactcctgcacccagcccggcttcagccccgattccgactcccaccccggcaccagcccctgccccagctgcagccccagccggcagcacagggactggggggcccggggtaggaagtgggggggccgggagcgggggggatccggctcggcctggcctgagccagcagcagcgcgccagtcagaggaaggcgcaagtccgggggctgccccgcgccaagaagcttgagaagctaggggtcttctcggcttgcaaggccaatggaacctgtaagtgtaatggctggaaaaaccccaagccccccactgcaccccgcatagatctgcagcagccagctgccaacctgagtgagctgtgccgcagttgtgagcaccccttggctgaccacgtatcccacttggagaatgtgtcagaggatgagataaaccgactgctggggatggtggtggatgtggagaatctcttcatgtctgttcacaaggaagaggacacagacaccaagcaggtctatttctacctcttcaagctactgcggaaatgcatcctgcagatgacccggcctgtggtggaggggtccctgggcagccctccatttgagaaacctaatattgagcagggtgtgctgaactttgtgcagtacaagtttagtcacctggctccccgggagcggcagacgatgttcgagctctcaaagatgttcttgctctgccttaactactgggagcttgagacacctgcccagtttcggcagaggtctcaggctgaggacgtggctacctacaaggtcaattacaccagatggctctgttactgccacgtgccccagagctgtgatagcctcccccgctacgaaaccactcatgtctttgggcgaagccttctccggtccattttcaccgttacccgccggcagctgctggaaaagttccgagtggagaaggacaaattggtgcccgagaagaggaccctcatcctcactcacttccccaaattcctgtccatgctggaggaggagatctatggggcaaactctccaatctgggagtcaggcttcaccatgccaccctcagaggggacacagctggttccccggccagcttcagtcagtgcagcggttgttcccagcacccccatcttcagccccagcatgggtgggggcagcaacagctccctgagtctggattctgcaggggccgagcctatgccaggcgagaagaggacgctcccagagaacctgaccctggaggatgccaagcggctccgtgtgatgggtgacatccccatggagctggtcaatgaggtcatgctgaccatcactgaccctgctgccatgctggggcctgagacgagcctgctttcggccaatgcggcccgggatgagacagcccgcctggaggagcgccgcggcatcatcgagttccatgtcatcggcaactcactgacgcccaaggccaaccggcgggtgttgctgtggctcgtggggctgcagaatgtcttttcccaccagctgccgcgcatgcctaaggagtatatcgcccgcctcgtctttgacccgaagcacaagactctggccttgatcaaggatgggcgggtcatcggtggcatctgcttccgcatgtttcccacccagggcttcacggagattgtcttctgtgctgtcacctcgaatgagcaggtcaagggttatgggacccacctgatgaaccacctgaaggagtatcacatcaagcacaacattctctacttcctcacctacgccgacgagtacgccatcggctacttcaaaaagcagggtttctccaaggacatcaaggtgcccaagagccgctacctgggctacatcaaggactacgagggagcgacgctgatggagtgtgagctgaatccccgcatcccctacacggagctgtcccacatcatcaagaagcagaaagagatcatcaagaagctgattgagcgcaaacaggcccagatccgcaaggtctacccggggctcagctgcttcaaggagggcgtgaggcagatccctgtggagagcgttcctggcattcgagagacaggctggaagccattggggaaggagaaggggaaggagctgaaggaccccgaccagctctacacaaccctcaaaaacctgctggcccaaatcaagtctcaccccagtgcctggcccttcatggagcctgtgaagaagtcggaggcccctgactactacgaggtcatccgcttccccattgacctgaagaccatgactgagcggctgcgaagccgctactacgtgacccggaagctctttgtggccgacctgcagcgggtcatcgccaactgtcgcgagtacaaccccccggacagcgagtactgccgctgtgccagcgccctggagaagttcttctacttcaagctcaaggagggaggcctcattgacaagtaggcccatctttgggccgcagccctgacctggaatgtctccacctcggattctgatctgatccttagggggtgccctggccccacggacccgactcagcttgagacactccagccaagggtcctccggacccgatcctgcagctctttctggaccttcaggcacccccaagcgtgcagctctgtcccagccttcactgtgtgtgagaggtctcctgggttggggcccagcccctctagagtagctggtggccagggatgaaccttgcccagccgtggtggcccccaggcctggtccccaagagctttggaggcttggattcctgggcctggcccaggtggctgtttccctgaggaccagaactgctcattttagcttgagtgatggcttcaggggttggaagttcagcccaaactgaagggggccatgccttgtccagcactgttctgtcagtctcccccaggggtggggggtatggggaccattcattccctggcattaatcccttagagggaataataaagctttttatttctctg

SEQ ID NO: 273 - DNA, 1263 bp, Homo sapiens
atggccccatggcccccgaagggcctagtcccagctatgctctggggcctcagcctcttcctcaacctcccaggacctatctggctccagccctctccacctccccagtcttctcccccgcctcagccccatccgtgtcatacctgccggggactggttgacagctttaacaagggcctggagagaaccatccgggacaactttggaggtggaaacactgcctgggaggaagagaatttgtccaaatacaaagacagtgagacccgcctggtagaggtgctggagggtgtgtgcagcaagtcagacttcgagtgccaccgcctgctggagctgagtgaggagctggtggagagctggtggtttcacaagcagcaggaggccccggacctcttccagtggctgtgctcagattccctgaagctctgctgccccgcaggcaccttcgggccctcctgccttccctgtcctgggggaacagagaggccctgcggtggctacgggcagtgtgaaggagaagggacacgagggggcagcgggcactgtgactgccaagccggctacgggggtgaggcctgtggccagtgtggccttggctactttgaggcagaacgcaacgccagccatctggtatgttcggcttgttttggcccctgtgcccgatgctcaggacctgaggaatcaaactgtttgcaatgcaagaagggctgggccctgcatcacctcaagtgtgtagacattgatgagtgtggcacagagggagccaactgtggagctgaccaattctgcgtgaacactgagggctcctatgagtgccgagactgtgccaaggcctgcctaggctgcatgggggcagggccaggtcgctgtaagaagtgtagccctggctatcagcaggtgggctccaagtgtctcgatgtggatgagtgtgagacagaggtgtgtccgggagagaacaagcagtgtgaaaacaccgagggcggttatcgctgcatctgtgccgagggctacaagcagatggaaggcatctgtgtgaaggagcagatcccagagtcagcaggcttcttctcagagatgacagaagacgagttggtggtgctgcagcagatgttctttggcatcatcatctgtgcactggccacgctggctgctaagggcgacttggtgttcaccgccatcttcattggggctgtggcggccatgactggctactggttgtcagagcgcagtgaccgtgtgctggagggcttcatcaagggcagataa

SEQ ID NO: 274 - DNA, 9725 bp, Homo sapiens
cgcgcgggctacctcagttctcgggcgtacggcgcggcctgtcctactgccgccggcgccgcggccgtcatggggttcctgaaactgattgagattgagaactttaagtcgtacaagggtcgacagattatcggaccatttcagaggttcaccgccatcattggacccaatggctctggtaagtcaaatctcatggatgccatcagctttgtgctaggtgaaaaaaccagcaacctgcgggtaaagaccctgcgggacctgatccatggagctcctgtgggcaagccagctgccaaccgggcctttgtcagcatggtctactctgaggagggtgctgaggaccgtacctttgcccgtgtcattgtaggaggttcttctgagtacaagatcaacaacaaagtggtccaactacatgagtacagtgaggaattagagaagttgggcattctcatcaaagctcgtaacttcctcgttttccagggtgctgtggaatctattgccatgaagaaccccaaagagaggacagctctatttgaagagattagtcgttctggggagctggcgcaggagtatgacaagcgaaagaaggaaatggtgaaggctgaagaggacacacagtttaattaccatcgcaagaaaaatattgcggctgaacgcaaggaagcaaagcaggagaaagaagaggctgaccggtaccagcgcctgaaggatgaggtagtacgggctcaggtacagctgcagctctttaagctttaccataatgaagtggaaattgagaagctcaacaaggaactggcctcaaagaacaaggagatcgagaaggacaagaagcgtatggacaaggtggaggatgaactgaaggagaagaagaaggagctgggcaaaatgatgcgggagcagcagcagattgagaaggagatcaaggagaaggactcagaattgaaccagaagcggcctcagtacatcaaagccaaggagaacacctcccacaaaatcaagaagctggaagcagccaagaagtctctgcagaatgctcagaagcactacaagaagcgtaaaggtgacatggatgagctggagaaggagatgctgtcagtggagaaggctcggcaggagtttgaagaacggatggaagaagagagtcagagtcagggcagagatttgacgttggaggagaatcaggtgaagaaataccaccggttgaaagaagaagccagcaagagagcagctaccctggcccaggagctggagaaattcaatcgagaccagaaagctgaccaggaccgtctggatctggaagaacggaagaaagtagagacagaggccaagatcaagcaaaagctgcgggaaattgaagagaatcagaagcggattgagaaactggaggaatacatcaccactagcaagcagtccctagaagagcagaagaagctagagggggagctgacagaggaggtggagatggccaagcggcgtattgatgaaatcaataaggagctgaaccaggtgatggagcagctaggggatgcccgcatcgaccgccaggagagcagccgccagcagcgaaaggcagagataatggaaagcatcaagcgcctttaccctggctctgtgtacggccgcctcattgacctatgccagcccacacaaaagaagtatcagattgctgtaaccaaggttttgggcaagaacatggatgccattattgtggactcggagaagacaggccgggactgtattcagtatatcaaggagcagcgtggggagcctgagaccttcttgcctcttgactacctggaggtgaagcctacagatgagaaactccgggagctgaagggggccaagctagtgattgatgtgattcgctatgagccacctcatatcaaaaaggccctgcagtatgcttgtggcaatgcccttgtctgtgacaacgtggaagatgcccgccgcattgcctttggaggccaccagcgccacaagacagtggcactggatggaaccctattccagaagtcaggagtgatctctggtggggccagtgacctgaaggccaaggcacggcgctgggatgagaaagcagtagacaagttgaaagagaagaaggagcgcttgacagaggagctgaaagagcagatgaaggcaaaacggaaagaggcagagctgcgtcaggtgcagtctcaggcccatggactgcagatgcggctcaagtactcccagagtgacctagaacagaccaagacacgacatctagccctgaatctgcaggaaaaatccaagctggagagtgagctagccaactttgggcctcgcattaatgatatcaagaggatcattcagagccgagagagggaaatgaaagacttgaaggagaagatgaaccaggtagaggatgaggtgtttgaagagttttgtcgggagattggtgtgcgcaacatccgggagtttgaggaagaaaaggtgaaacggcagaatgaaatcgccaagaagcgtttggagtttgagaatcagaagactcgcttgggcattcagttggattttgaaaagaaccaactgaaggaggaccaagataaagtacacatgtgggagcagacagtgaaaaaagatgaaaatgagatagaaaagctcaaaaaggaggaacaaagacacatgaagatcatagatgagaccatggctcagctacaagacctgaagaatcagcatctggccaagaagtcggaagtgaatgacaagaatcatgagatggaggagattcgtaagaaactcgggggcgccaacaaggaaatgacccatttacagaaggaggtgacagccattgagaccaagcttgaacagaagcgcagtgaccgtcacaacttgctacaggcctgtaagatgcaggacattaagttgccactgtcaaaaggcaccatggatgatattagtcaggaagagggtagctcccagggggaggactcagtgagtggttcacagagaatttccagtatctatgcacgagaggccctcattgagattgactacggtgatctgtgtgaggatctgaaggatgcccaggctgaggaagagatcaagcaagagatgaacacactgcagcagaagctgaatgagcagcagagtgtgcttcagcgtattgccgcccccaacatgaaggccatggaaaagctggaaagtgtccgagacaagttccaggagacctcagatgagtttgaagcagcccgaaagcgagcaaagaaggccaagcaggcattcgaacagatcaagaaggagcgctttgaccgcttcaatgcttgttttgaatctgtggctaccaacattgatgagatctataaggccctgtcccgcaatagcagtgcccaggcattcctgggccctgagaaccctgaagagccctacttggatggcatcaactacaactgtgtggctcctgggaaacgcttccggcctatggacaacttgtcaggcggggagaagacagtggcagctctggccctgctctttgccatccacagctacaagccagcccccttcttcgtcctggatgagattgatgctgccttggataacaccaacattggcaaggtggcaaattacatcaaggagcagtcgacttgcaacttccaggccatcgtcatctctctcaaggaggagttctacaccaaggccgagagcctcattggagtctatcctgagcaaggggactgtgtgatcagcaaagtcctgaccttcgacctcaccaagtacccagatgccaaccccaaccccaatgagcagtagcagtatttttgccctcccgccctgtctggatccctaagctgtccctctcccaatctctggatatttgactcccaaccttccccctacctcctggccctttttggtgtagtcatgggatttaggcactgctaatcaagcatgaagaggaacagaggtgatgttaggtctggagcaaaaattcctgaacgacagggagtattctggcctctgaaaggaggtgctgagctgaacagggccatctgttcatcacacacacccccttcctccccctcatcacccataatcgtgggccccttgggcctcttgcccactgtgtgtgtgggtatgtatgtgtgtatgtatgtatccgcatgtgtgcatgtgagtatgtttgcaaaataataaaggatattggagacctgttttagaaggagcctaggctgaatttgattccaagagagcttaggatgacagcacccctgagctgggcaaaggtactcaggacctcataggagtcttaggcagttacctgaaactgccttcattcactcatttgtgtattcattcatttatgtattcatcagacacataccgaacaccctctatttgtcaggctctgtgcttggaatacagagttgaatcagacatgatctctaccctcctagtaaggagatacagtgggttcatgaatgactatagttagctgaatgtcatatgtactttgaatttgagaagtgggtgatcccctctaggcttcctggaggtcacatttaagctagaccttgacaaattggtaggatttggtcaggcactaggagtggagcatgagctctggggacagacagttatgggttctggtcccactttttatcacttactagttgtttgaccttgggcaagtcatttgaccttctgtgcctcagtttcctcatctgtaaaatggggctaacaatattacctacctcataggatttaatgatgtcaagctcctcactggaggccttatcccttcgtggagcccactaggtgccgacccctcagaatataaccctcatgcctggacccctgagagcttctgatcccagctattagggacagaagaagcctccaaatctggaaggtgctgaatgccctgctgactgggaaagtttcagggcactgatggggtctacctggtaagcggagggcctgaggaaacctgtagcttcaatcatgtctggtaaccgggtgcctgagccccaatctgggttgtgaggaaataggggagaggtatcctgggccacatcccagcctaacacctgtgaggttcattttaggaactaacctcattagctataaggatcatgcagaggcagcaaagccgggtgcgatgagctcagcctttactcattcacatacaccatcacactttaattccaatctgtatattgctttttaaaagttaagtccattctaattacccaaatatgcatgaattcattctccttttgagaagttagattgttaaagatagtctcattcagctaccaaccactccttgatccttcccttcttagtggctgttgtttgttgtacttccgtttagactttgttttaatgcttgtacgtacatatgtgaactcattggaaatattgtgtgtttaatgcaaatgatatattgaattgtttagcaatttgttttctttgcttaacgatgtttttgagatctgtgcatgttacttaatgtagctcaatccatcttctgtaattgctgtatagattgtcatcatatgattaccacattttacttacgcatttcttttgtgatggacattaagactgtttttaggttttgctattacaaaatactacacaggagcatcactatgcctgtgtgaaagtatatgtatgaaagtttacctagggttgattcctagaagtggaattgcaaagtcataggatatttatatattggtttttaataatacttccaaattgccctcctgtactatttactcagtatttttcttgaggttgatctgaggtctaacattgttatcctatatcattttcatcccaagtagtgatatctgtgaaatcacaggtttgatgtgtgctaattatgtattcttctaatacatattaaaagacataactatcaaaacaaaataaatttgtctgttttcaaccaaagaagtcacgtaccactggtggtactgtgtgccataatttggcaaatgctggcctttatggacgagcacaattcgggggtcagacctggttcaaattctagctgtagaaacttgtgcaagttacttcacctctgagcctaagtttccacatctgtaaaaggagataataaacacctaccttgcagtagtgaagcaaagagaaaattaaatatatatgaagcaatttggctggcatctagatcattcacagccctttaaaggtcacctttgctgttctccccactttacagataaggaaactgaggcccaaaaaggtttgaacccaggtcttccaagtcattcaagtgctttctccactgtacaggtggttatcaaccttggctgcgcatcagaatcgtttgtaaagctttttctttttcctttttaaaaagtaaagcaatatatacacaggtaaaaaaataaaatagtacagaagggcttataatgagaagcagcagttccctgcttgcacccccacatccaaaggatgtggagctctttaaaaataaattgctctggtcccacctctggaaatctgattcagccagcatggataataacccagataactaacccctacctcacaggataaaaaggattacatgagatgccttaggctaaggccctggcacacaggaacacatgtgctacaaaggagctttggggacttaagtcctgaggatccaggaggtgaggtgacttgtccaagattccactggtttagtggcagagcctagacttccactcggatctatttagtgcttgccccctgctctctcctgtcgtgccccaccacctcctggcatcacagggcaaccgttgtcaaggctatgctcacgggaggctgggcaccacagtgtttccaagagcaagctggatccgagtagattccctagggcttgttggaggaactagtttgactcccttatactgtggacgcagtagccttgctgtagggagttgaagagtactccacaacagtatcttaagtttaactgggcacttccctctggaaatcacagtgttgtgcaccaggaacacaaagatgagtcaaatctttatcctgcctttgaggagctcactgtttagttggggaaaccatttgtaaaacagccattaaccatacagtgtgatcaacactgacaggagcacaggaaaaacatctagcttatgtgaagattcagagaaggcatcctgtagtctaggtggtgatacctgaactgagtcttgagggacgggtaggaattagccagttgaggaagtagaaggaatttccagatattggaaacagtatgcatgaagacatgaaggcaagaaacagcaaaacaaatactgaagcatgaagattcctggggtggggggaaagcagcaagaaaaggtagagaggaaccagattggaagagggtcgtaaatgcatggctacagaattcagatttgttttgtaggacagtgtggttcccaaactggctgtataccacaaacaggtacggcattctgggccccggcccctaaaacattcattaagtctggggtgaagatttggaatcttgaatgcttataaaggttaccacatgactagggtacagccagatttggaaaccatagcttgaaggcagtgagggagccatgaaatggtttttaatagggggactccagatcagatgtgaacttaacctgtttctggctggctagccaaccagcatggaaaacagattaggttagatgttcatgctgtatgtgcccgtgcctgtagcttccctgttaatcagcttcttacactactatatttgcttattttgtctctgaataagctttaggcaccacaagggtgggcctggggatattttgcttaccagtatagcccctgcaaaaaagcacagtgcctgacacaaaacaggcacccagtaaagtttttgaatgaatgaatgcatgagtgaatccatttgtgagagagcgaatggagatgacaagattagctaggagactggaaaaagaccaggaggcctgcactagggcaaaggccagtaggaatagattggaggtgttaaggtgtgaactgttaaggtaagatgataacttaatgactgattattggatgtggagggtgactgagaggatagaatgagtacccatgaatagccatgattcctaccctgtcccagtcatctctttccttatccatctctgaaacaatctgcttacatcctcctcagcaactggaattcctcaagttagttagacattctgtgtgctgtgtggtctctcactgcccccccactccccacccctccacaagccattgattcattcatccagttcaataaatcttggctaagcacctccagtgtgcagtaaggctcttccaagccaggactctgactccctctttcctacctcaagagatgtttttgagggctttcccaggtaagagtcacatctcttatacaataacttatagtgagatacccagaatgtcagacttgtaagggaagactgcccaaaccccttctgaggtcctcagaggggaattaacttcctaaggtccgactgctaggaagtgttggagccagaaatggaacctaggtttcctttctatgtcatctctggagtcttgatcttgatctatcccattgtagatcaggacaggcagaggtggtcagggagaaggtgggacttaggttgaaccttgaaggtcaatgtattggacaggtcaaacaagatggttgccaattacactgcccccttctggaaacccttagcaaacctgccatgcttgcagtcccttctaaggggtttccttagcataagttgccatgctctgtaccatgtgacctcacaatcctggccacagatagctagatgtggatagtgtctggttcaagggcaaccaatctctaggctggccagtggcctgttagctggactggcataaggacttcaccttacaggggtggcatgtatcaaatggcaaatgtatgaaacaaccagatctttcagggaggcagaatgtgagctattcagaagaagtgaacgttaattagaatttaatgaggcattagtggtggtggatgaggggtggccagaaactaaacagcaaaagcaaagagaaagctgcagaaaccataagtaagcagaggtcatgagacatttgtataatgagatcacggagccacagggtggcagaagccatgaagcagcaaggcaacaatgggctagaagccatgaagcaataggagccacgaggaacagaaaccgtgagacaaaactgactatgagatccacaaagcagcagaaggcttgaatagataagatcatgagacagtagaagcgatgagactgcaagaaccacaaggtagccagaaccatgtggcaacatggcaacaggaatggaagaggcagcaggagctacaatgcagaaaagccatggattaataggaactgaagcgccgggagccatgaagctgcaggacccatgaggcagaaaaagccatgggctagcatcgaggggggcagaaagaagttagtcagtagcagtaggaggagtataaatacagccagaaaggagttgagtcaccaatttgggaagcactagagaagggagcaacagatgcctgcagctgagggggtgacaagataagccaggctctagagctgctttggatcatgaaccattttcaagtttctgttcttccatgaggctgcctgtgtagctgttcttgtcttccttatttccctgtgaatgctttaataaatccccatcactaa

SEQ ID NO: 275 - DNA, 1425 bp, Homo sapiens
atggcgtacatccagttggaaccattaaacgagggttttctttctagaatctctggtctgctgctgtgcagatggacctgccggcactgctgtcagaagtgctacgagtccagctgttgccagtcaagtgaggatgaagttgaaattctgggacctttccctgctcagacccctccctggctgatggccagccggagcagtgacaaggatggtgactctgtccacacggccagcgaagtcccgctgaccccacggaccaattccccggatggaagacgctcgtcctcagacacatccaagtctacatacagcctgacgcggaggatttcgagtcttgagtcaagacgtcccagctctccactcatcgatattaaacccatcgagtttggcgttctcagcgccaagaaggagcccatccaaccttcggtgctcagacggacctataaccccgacgactatttcaggaagttcgaaccccacctgtactccctcgactccaacagcgacgatgtggactctctgacagacgaggagatcctgtccaagtaccagctgggcatgctgcacttcagcactcagtacgacctgctgcacaaccacctcaccgtgcgcgtgatcgaggccagggacctgccacctcccatctcccacgatggctcgcgccaggacatggcgcactccaacccctacgtcaagatctgtctcctgccagaccagaagaactcaaagcagaccggggtcaaacgcaagacccagaagcccgtgtttgaggagcgctacaccttcgagatccccttcctggaggcccagaggaggaccctgctcctgaccgtggtggattttgataagttctcccgccactgtgtcattgggaaagtttctgtgcctttgtgtgaagttgacctggtcaagggcgggcactggtggaaggcgctgattcccagttctcagaatgaagtggagctgggggagctgcttctgtcactgaattatctcccaagtgctggcagactgaatgttgatgtcattcgagccaagcaacttcttcagacagatgtgagccaaggttcagacccctttgtgaaaatccagctggtgcatggactcaaacttgtgaaaaccaagaagacgtccttcttaaggggcacaattgatcctttctacaatgaatccttcagcttcaaagttccccaagaagaactggaaaatgccagcctagtgtttacagttttcggccacaacatgaagagcagcaatgacttcatcgggaggatcgtcattggccagtactcttcaggcccctctgagaccaaccactggaggcgcatgctcaacacgcaccgcacagccgtggagcagtggcatagcctgaggtcccgagctgagtgtgaccgcgtgtctcctgcctccctggaggtgacctga

SEQ ID NO: 276 - DNA, 1125 bp, Homo sapiens
atgctgtccacatctcgttctcggtttatcagaaataccaacgagagcggtgaagaagtcaccaccttttttgattatgattacggtgctccctgtcataaatttgacgtgaagcaaattggggcccaactcctgcctccgctctactcgctggtgttcatctttggttttgtgggcaacatgctggtcgtcctcatcttaataaactgcaaaaagctgaagtgcttgactgacatttacctgctcaacctggccatctctgatctgctttttcttattactctcccattgtgggctcactctgctgcaaatgagtgggtctttgggaatgcaatgtgcaaattattcacagggctgtatcacatcggttattttggcggaatcttcttcatcatcctcctgacaatcgatagatacctggctattgtccatgctgtgtttgctttaaaagccaggacggtcacctttggggtggtgacaagtgtgatcacctggttggtggctgtgtttgcttctgtcccaggaatcatctttactaaatgccagaaagaagattctgtttatgtctgtggcccttattttccacgaggatggaataatttccacacaataatgaggaacattttggggctggtcctgccgctgctcatcatggtcatctgctactcgggaatcctgaaaaccctgcttcggtgtcgaaacgagaagaagaggcatagggcagtgagagtcatcttcaccatcatgattgtttactttctcttctggactccctataatattgtcattctcctgaacaccttccaggaattcttcggcctgagtaactgtgaaagcaccagtcaactggaccaagccacgcaggtgacagagactcttgggatgactcactgctgcatcaatcccatcatctatgccttcgttggggagaagttcagaagcctttttcacatagctcttggctgtaggattgccccactccaaaaaccagtgtgtggaggtccaggagtgagaccaggaaagaatgtgaaagtgactacacaaggactcctcgatggtcgtggaaaaggaaagtcaattggcagagcccctgaagccagtcttcaggacaaagaaggagcctag

SEQ ID NO: 277 - DNA, 1416 bp, Homo sapiens
attcggcaccgcagcgtaggtgctaccaccgctgccgtcgccgccgccattttgatggcaggaagagtccggttctgggacagctggagacagtggtggtgactgaaataactttaccaaaggaaagctattttgcgaactatcttctccagcggagatggccaatgtgctttgtaacagagccagactggtttcctatctcccaggattttgctctttagttaaaagggttgtcaatcccaaagccttttcgactgcaggatcatcaggttcggatgagtctcatgtggctgctgcacctccagatatatgctctcgaacagtgtggcctgatgaaactatgggaccctttggacctcaagatcagaggttccagcttcctgggaacataggttttgattgtcacctcaatgggactgcttcacagaagaaaagcctggttcataaaactttgcctgatgttctagcagaacctttatcaagtgaaagacatgagtttgtgatggcacaatatgtgaatgaatttcagggtaatgatgcacctgttgaacaagaaattaacagtgcagaaacttactttgaaagtgccagagtagagtgtgcaatacaaacatgtccagaattgctgcgaaaagattttgaatcactgtttccagaagtagctaatggcaaactaatgattctgactgtaacacaaaaaactaagaatgatatgactgtttggagtgaagaagtagaaattgaaagagaagtgctcttagaaaagttcatcaatggtgctaaggaaatttgctatgctcttcgagctgagggttattgggctgactttattgacccatcatctggtttggcattttttggaccatatacaaacaacactctttttgaaactgatgaacgctaccgacatttaggattctctgttgatgaccttggatgctgtaaagtgattcgtcatagtctctggggtacccatgtagttgtagggagtatcttcactaatgcaacaccagacagccatattatgaagaaattaagtggaaattagcagaaatatccattcatttgctgtactatttgtatgtaatatttgggttgatctataaacactgtcagactaaagtttttaaaatatacttatttctaagtatttatttcagcatttatgaatttgcaacattggcaagtgatttgggattttaaaattgcaaatgttcatttattcatatcattgaatacacgttgaacacatccacattgtataggatgtggtaattagcttgtaaccagggtatgatctgctattgttatttctcctctttattggaaaaaggcctcagttttaattattttcttcccaaaataaatcacacatttggttacaaaaaaaaaaaaaaaaaaaaaaaaaaaaaaaaa

SEQ ID NO: 278 - DNA, 1095 bp, Homo sapiens
atgtgggccccgcgggagcagctactgggctggactgcggaagctctgcctgccaaggattctgcctggccctgggaagagaagcctagatatctgggaccagtgactttcgaggatgtggctgtgcttttcactgaggcagagtggaagagactgagccttgagcagaggaacctatacaaagaagtgatgctggaaaatctcaggaatctggtctcattggcagaatcaaagccagaagtccatacctgcccttcttgccctctggcctttggcagtcagcagttcctcagccaagatgagctacacaatcatcctattccaggtttccatgcaggaaatcaactccacccaggaaatccctgcccagaggatcagccacagtcacaacatccttctgataaaaatcacaggggggctgaagcagaagatcaacgagtggaaggaggcgtcagacccttgttttggagtacaaatgaaaggggggctttagtgggtttctctagcctgttccagagaccaccaataagctcttggggaggcaacagaatattagagatacagctcagtccagcccagaatgcaagctctgaggaagtagacagaatttccaagagggcagaaaccccagggtttggagcagtcacgtttggggagtgtgcactagcttttaaccagaagtcaaacctgttcagacagaaggcagtcacagcagaaaaatcttcagacaaaaggcagtcacaggtgtgcagggagtgtgggcgaggctttagcaggaagtcacagctcatcatacaccagaggacacacacaggagaaaagccttatgtctgcggagagtgtgggcgaggctttatagttgagtcagtcctccgcaaccacctgagtacacactccggggagaaaccttatgtgtgcagccattgtgggcgaggctttagctgcaagccatacctcatcagacatcagaggacacacacaagggagaaatcgtttatgtgcacagtgtgtgggcgaggctttcgtgaaaagtcagagctcattaagcaccagagaattcacacgggggataagccttatgtgtgcagagattga

SEQ ID NO: 279 - DNA, 2460 bp, Homo sapiens
atggatactgaggggtttggtgagctccttcagcaagctgaacagcttgctgctgagactgagggcatctcagagcttccccatgtggaacggaacttacaggagatccagcaggcgggagagcgcctgcgttcccgtaccctaacacgcacgtcccaggagacggcagatgtcaaggcgtcagttctcctcgggtctcggggacttgacatatcccacatctcccagcgattggagagtctgagtgcagccaccacctttgagcctcttgagcctgtgaaggacactgacattcagggcttcctgaagaatgagaaggacaatgccctgctgtctgccatcgaagagtcccggaagaggaccttcggcatggctgaggagtaccatcgggagtcaatgttggttgagtgggagcaagtgaaacagcgaattctgcacacactgctggcatcaggagaagacgcccttgactttactcaagaaagcgagccaagctacatcagtgatgtgggaccccctggtcgaagctctctggataacatcgagatggcctatgcgcggcaaatttatatctataatgagaaaattgtaaatggacacctgcagcctaacctggtggacctttgtgcttccgtcgcagagctcgatgataagagcatttccgacatgtggaccatggtaaaacaaatgacagacgtgttgttgacaccggcaacggatgccctgaagaaccgcagcagcgtggaagtgcgcatggagtttgtcaggcaggccttggcgtaccttgagcagagttataagaattacacccttgtgactgtctttggaaatttgcatcaggcccagctgggcggggtgcctgggacttaccaattggttcgaagtttcctgaacattaaactgccagctcccttgcctggactacaggatggagaggtggaaggccatcctgtgtgggcgctaatttactactgcatgcgctgtggagacctgcttgccgcttcacaggtagttaatcgagcccagcaccagctgggagagtttaaaacctggttccaggagtacatgaacagcaaggacagaagattgtccccagctacggaaaacaagctccggctgcattaccgtagggccctcaggaacaatacagatccctacaagcgggccgtgtactgtatcattggcagatgtgacgtcaccgacaaccagagtgaagtggcggacaaaactgaggattacctgtggctgaagttgaaccaagtgtgttttgacgacgatggcaccagctccccacaagacaggctcactctctcacagttccagaagcagttgttggaagactatggcgagtcccactttacggtgaaccagcaacccttcctctacttccaagtcctgttcctgacagcgcagtttgaagcagcagttgcctttcttttccgcatggagcggctgcgctgccatgctgtccatgtagcactggtgctgtttgagctgaagctgcttttaaagtcctctggacagagtgctcagctcctcagccacgagcctggtgaccctccttgcttgcggcggctgaacttcgtgcggctcctcatgctgtacacccggaagtttgagtccacggacccaagggaggccctccagtacttctatttcctcagggatgagaaagatagtcaaggagaaaacatgtttctgcgctgtgtgagtgagcttgtgattgaaagccgagagttcgatatgattcttgggaaactagagaatgacggaagtagaaagcctggagtcatagataagtttactagtgacacaaagcctattatcaacaaagttgcttctgtggcagaaaataaaggactgtttgaagaggcagcaaagctgtatgaccttgccaagaatgctgacaaggtactggagctgatgaacaaactgctgagccctgtcgtcccccagatcagtgccccgcaatccaacaaggagaggctgaagaacatggcactctccattgccgaacggtatagggctcaaggaataagcgcaaataaatttgtggactccacgttctatcttcttttggacttgatcaccttttttgacgagtatcatagtggtcatattgatagagcttttgatatcattgagcgcttgaagctggtgcccctgaatcaggaaagtgtggaagagagagtggctgccttcagaaatttcagtgatgaaatcaggcacaacctctcagaagtgcttcttgccaccatgaacatcttgttcacacagtttaagaggctcaaggggacaagtccatcctcgtcatccaggccccagcgagtcatcgaggaccgcgactctcaactccgaagtcaagcccgcactctgattacctttgctggaatgataccataccgaacgtctggggacaccaatgcgaggctggtgcagatggaggtcctcatgaattaa

SEQ ID NO: 280 - DNA, 2409 bp, Homo sapiens
atggctgcgacgcgtgcagggccccgcgcccgcgagatcttcacctcgctggagtacggaccggtgccggagagccacgcatgcgcactggcctggctggacacccaggaccggtgcttgggccactatgtgaatgggaagtggttaaagcctgaacacagaaattcagtgccttgccaggatcccatcacaggagagaacttggccagttgcctgcaggcacaggccgaggatgtggctgcagccgtggaggcagccaggatggcatttaagggctggagtgcgcaccccggcgtcgtccgggcccagcacctgaccaggctggccgaggtgatccagaagcaccagcggctgctgtggaccctggaatccctggtgactgggcgggctgttcgagaggttcgagacggggacgtccagctggcccagcagctgctccactaccatgcaatccaggcatccacccaggaggaggcactggcaggctgggagcccatgggagtaattggcctcatcctgccacccacattctccttccttgagatgatgtggaggatttgccctgccctggctgtgggctgcaccgtggtggccctcgtgcccccggcctccccggcgcccctcctcctggcccagctggcgggggagctgggccccttcccgggaatcctgaatgtcctcagtggccctgcgtccctggtgcccatcctggcctcccagcctggaatccggaaggtggccttctgcggagccccggaggaagggcgtgcccttcgacggagcctggcgggagagtgtgcggagctgggcctggcgctggggacggagtcgctgctgctgctgacggacacggcggacgtagactcggccgtggagggtgtcgtggacgccgcctggtccgaccgcggcccgggtggcctcaggctcctcatccaggagtctgtgtgggatgaagccatgagacggctgcaggagcggatggggcggcttcggagtggccgagggctggatggggccgtggacatgggggcccggggggctgccgcatgtgacctggtccagcgctttgtgcgtgaggcccagagccagggtgcacaggtgttccaggctggtgatgtgccttcggaacgcccattctatcccccaaccttggtctccaacctgcccccagcctccccatgtgcccaggtggaggtgccgtggcctgtggtcgtggcctcccccttccgcacagccaaggaggcactgttggtggccaacgggacgccccgcgggggcagcgccagtgtgtggagcgagaggctggggcaggcgctggagctgggctatgggctccaggtgggcactgtctggatcaacgcccacggcctcagagacccttcggtgcccacaggcggctgcaaggagagtgggtgttcctggcacgggggcccagacgggctgtatgagtatctgcggccctcagggacccctgcccggctgtcctgcctctccaagaacctgaactatgacacctttggcctcgctgttccctcaaccctgccggctgggcctgaaatagggcccagcccagcacccccctatgggctcttcgttgggggccgtttccaggctcctggggcccgaagctccaggcccatccgggattcgtctggcaacctccatggctacgtggctgagggtggagccaaggacatccgaggtgctgtggaggccgctcaccaggctttccctggctgggcgggccagtccccaggagcccgggcagccctgctgtgggccctggcggctgcactggagcgccggaagtctaccctggcctcgaggctggagaggcagggagcggagctcaaggctgcggaggcggaggtggagctgagcgcaagacgacttcgggcgtggggggcccgggtgcaggcccaaggccacaccctgcaggtagccgggctgagaggccctgtgctgcgcctgcgggagccgctgggtgtgctggctgtggtgtgtccggacgagtggcccctgcttgccttcgtgtccctgctggctcccgccctggcctacggcaacactgtggtcatggtgcccagtgcggcctgtcctctgctggccctggaggtctgccaggacatggccaccgtgttcccagcaggcctggccaacgtggtgacaggagaccgggaccatctgacccgctgcctggccttgcaccaagacgtccaggccatgtggtatttcggatcagcccagggttcccagtttgtcgagtgggcctcggcaggaaacctcaaaccggtgtgggcgagcaggggctgcccgcgggcctgggaccaggaggccgagggggcaggcccagagctggggctgcgagtggcgcggaccaaggccctgtggctgcctatgggggactga

SEQ ID NO: 281 - DNA, 1669 bp, Homo sapiens
ggggcgagacctacgacgccggcgagcagtggccgttacgcctaaaaagatggcggtcttggcacctctaattgctctcgtgtattcggtgccgcgactttcacgatggctcgcccaaccttactaccttctgtcggccctgctctctgctgccttcctactcgtgaggaaactgccgccgctctgccacggtctgcccacccaacgcgaagacggtaacccgtgtgactttgactggagagaagtggagatcctgatgtttctcagtgccattgtgatgatgaagaaccgcagatccatcactgtggagcaacatataggcaacattttcatgtttagtaaagtggccaacacaattcttttcttccgcttggatattcgcatgggcctactttacatcacactctgcatagtgttcctgatgacgtgcaaaccccccctatatatgggccctgagtatatcaagtacttcaatgataaaaccattgatgaggaactagaacgggacaagagggtcacttggattgtggagttctttgccaattggtctaatgactgccaatcatttgcccctatctatgctgacctctcccttaaatacaactgtacagggctaaattttgggaaggtggatgttggacgctatactgatgttagtacgcggtacaaagtgagcacatcacccctcaccaagcaactccctaccctgatcctgttccaaggtggcaaggaggcaatgcggcggccacagattgacaagaaaggacgggctgtctcatggaccttctctgaggagaatgtgatccgagaatttaacttaaatgagctataccagcgggccaagaaactatcaaaggctggagacaatatccctgaggagcagcctgtggcttcaacccccaccacagtgtcagatggggaaaacaagaaggataaataagatcctcactttggcagtgcttcctctcctgtcaattccaggctctttccataaccacaagcctgaggtgcagcttttatttatgttttccctttggctgtgactgggtggggcagcatgcagcttctgattttaaagaggcatctagggaattgtcaggcaccctacaggaaggcctgccatgcttgtggccaactgtttcactggagcaaagaaagagatctcataggacggagggggaaaatggttttccctccaagcttgggtcagtgtgttaactgcttatcagctattcagacatctccatggtttctccatgaaactctgtggtttcatcattccttcttagttgacctgcacagcttggttagacctagatttaaccctaaggtaagatgctggggtatagaacgctaagaattttcccccaaggactcttgcttcctcaagcccttctggcttcgtttatggtcttcattaaaagtataagcctaactttgtcgctagtcctaaggagaaacctttaaccacaaagtttttatcattgaagacaatattgaacaaccccctattttgtggggattgagaaggggtgaatagaggcttgagactttcctttgtgtggtaggacttggaggagaaatcccctggactttcactaaccctctgacatactccccacacccagttgatggctttccgtaataaaaagattgggatttccttttg

SEQ ID NO: 282 - DNA, 1316 bp, Homo sapiens
atgcgccaagcccacgcggttccgggtcccaagatttggctccaagagctattcgcagagaaacagcctcgcacaaaaagccaccgcccccgaaacccgcgggaaatctgtttcctgtgaaaggcctggcctccgggcattggcggtttccctgatcctctctcccaaattttccggcaggggattgatcgaggcgacatttaggactggggtgggcgagggagtggcggttctcgtcccaagttacaggtgaggacgttcaggccaaggcgtagccaagatcgcgccgccctgtagcttgaggaggcgccgggattcgaaccaaggctgtgcccaatcctaagccctgcgaggtcttgtggaaccgacatgacccactctttggtttgtccagagacagtgagcagggtgagttcagtgctgaatcgcaacactcggcagtttggaaaaaaacatcttttcgaccaggatgaggagacatgttggaactcagaccagggcccctcccagtgggtgacgctggagtttccccagctcatccgtgtctcccagctgcagatccagtttcagggtggcttctccagtcgccggggctgcctggaaggttcacagggcactcaggctctccacaagattgtagatttctaccctgaggacaacaactcgcttcagactttccccataccagctgctgaagtggaccggctgaaggtgacgtttgaggatgccactgacttttttggccgtgtggtcatctaccacctgcgggtgcttggggagaaggtgtgagacctctaggggctgtctcctccaggaagccctccgggaagcacagcaaagtccctcattctgcacagaaggtttattggttcctcttgggaagggtcccctcccaccacctgtccagaagctgcctttgaagtcagttctgggtttccccagctctggctgaccattttgttccctgagtgtctgagtccccggcaggcggccttcactcagggtcagcgggcaccaggttgctctggaagagcttgaggatgtggttctcgatcacctgttgcactgagatggggcagggaaaaggtgggctgtgagcttgaatcgggagtggggtggaggcacaggccaacctgcgctctccccttaggggacaaacagggacccttgcagagacctgcattacagagcaaagctgggagaaccgaggactcaccccaggaacctcaacttcccctaagtttgtaaaaatgcacttttgtagcttttcagaattaatataaaaatatttcctaccaaaaaaaaaaaaaaaaaaa

SEQ ID NO: 283 - DNA, 2824 bp, Homo sapiens
gctgccacctctctagaggcacctggcggggagcctctcaacataagacagtgaccagtctggtgactcacagccggcacagccatgaactacccgctaacgctggaaatggacctcgagaacctggaggacctgttctgggaactggacagattggacaactataacgacacctccctggtggaaaatcatctctgccctgccacagaggggcccctcatggcctccttcaaggccgtgttcgtgcccgtggcctacagcctcatcttcctcctgggcgtgatcggcaacgtcctggtgctggtgatcctggagcggcaccggcagacacgcagttccacggagaccttcctgttccacctggccgtggccgacctcctgctggtcttcatcttgccctttgccgtggccgagggctctgtgggctgggtcctggggaccttcctctgcaaaactgtgattgccctgcacaaagtcaacttctactgcagcagcctgctcctggcctgcatcgccgtggaccgctacctggccattgtccacgccgtccatgcctaccgccaccgccgcctcctctccatccacatcacctgtgggaccatctggctggtgggcttcctccttgccttgccagagattctcttcgccaaagtcagccaaggccatcacaacaactccctgccacgttgcaccttctcccaagagaaccaagcagaaacgcatgcctggttcacctcccgattcctctaccatgtggcgggattcctgctgcccatgctggtgatgggctggtgctacgtgggggtagtgcacaggttgcgccaggcccagcggcgccctcagcggcagaaggcagtcagggtggccatcctggtgacaagcatcttcttcctctgctggtcaccctaccacatcgtcatcttcctggacaccctggcgaggctgaaggccgtggacaatacctgcaagctgaatggctctctccccgtggccatcaccatgtgtgagttcctgggcctggcccactgctgcctcaaccccatgctctacactttcgccggcgtgaagttccgcagtgacctgtcgcggctcctgacgaagctgggctgtaccggccctgcctccctgtgccagctcttccctagctggcgcaggagcagtctctctgagtcagagaatgccacctctctcaccacgttctaggtcccagtgtccccttttattgctgcttttccttggggcaggcagtgatgctggatgctccttccaacaggagctgggatcctaagggctcaccgtggctaagagtgtcctaggagtatcctcatttggggtagctagaggaaccaacccccatttctagaacatccctgccagctcttctgccggccctggggctaggctggagcccagggagcggaaagcagctcaaaggcacagtgaaggctgtccttacccatctgcacccccctgggctgagagaacctcacgcacctcccatcctaatcatccaatgctcaagaaacaacttctacttctgcccttgccaacggagagcgcctgcccctcccagaacacactccatcagcttaggggctgctgacctccacagcttcccctctctcctcctgcccacctgtcaaacaaagccagaagctgagcaccaggggatgagtggaggttaaggctgaggaaaggccagctggcagcagagtgtggccttcggacaactcagtccctaaaaacacagacattctgccaggcccccaagcctgcagtcatcttgaccaagcaggaagctcagactggttgagttcaggtagctgcccctggctctgaccgaaacagcgctgggtccaccccatgtcaccggatcctgggtggtctgcaggcagggctgactctaggtgcccttggaggccagccagtgacctgaggaagcgtgaaggccgagaagcaagaaagaaacccgacagagggaagaaaagagctttcttcccgaaccccaaggagggagatggatcaatcaaacccggcggtcccctccgccaggcgagatggggtggggtggagaactcctagggtggctgggtccaggggatgggaggttgtgggcattgatggggaaggaggctggcttgtcccctcctcactcccttcccataagctatagacccgaggaaactcagagtcggaacggagaaaggtggactggaaggggcccgtgggagtcatctcaaccatcccctccgtggcatcaccttaggcagggaagtgtaagaaacacactgaggcagggaagtccccaggccccaggaagccgtgccctgcccccgtgaggatgtcactcagatggaaccgcaggaagctgctccgtgcttgtttgctcacctggggtgtgggaggcccgtccggcagttctgggtgctccctaccacctccccagcctttgatcaggtggggagtcagggacccctgcccttgtcccactcaagccaagcagccaagctccttgggaggccccactggggaaataacagctgtggctcacgtgagagtgtcttcacggcaggacaacgaggaagccctaagacgtcccttttttctctgagtatctcctcgcaagctgggtaatcgatgggggagtctgaagcagatgcaaagaggcaagaggctggattttgaattttctttttaataaaaaggcacctataaaacaggtcaatacagtacaggcagcacagagacccccggaacaagcctaaaaattgtttcaaaataaaaaccaagaagatgtcttcaaaaaaaaaaaaaaaaaaaaaaa

SEQ ID NO: 284 - DNA, 733 bp, Homo sapiens
ctcttggcaaatagatcccactctctgagggttgtgttggggctcagaaaatactaccccgaagtatgacactttggcatgctgaatactttgaactaaaagagattggaaggcctcagaagcagcctcggaagcagtctctccctctgatctcctgcccttctgtctcctgcccatctttcgtcccagaagtgagtcacagaaaccagaattcttccccaagcgcagcttaacttggactcaccacctatcaagtgctcgacagccacgtgtgcagtggttcctacgtggagcagcatacatccagagatgcaaatattaatgaggacagtgctagtaacagagttgctgagcaatctatgtccccttgtaagaaccagtgccccaggggaagaaacagaactccacaaggtagcagtgtgggtgtagtacccgcatgtgcccatgttatgggaatgtagatggggagtgaccaccgccaacagaagtgtggccatcttgcccgagatgcctgaggacctcctatttttagatgctgctgcccaaggcctgtatttcatgctatggcttttgtcatttgaattatcagtagctgtctcggagctattacgcttcactgggccctggaggatattgtcttatacagtccactgggttttggatatgcagtctgtgcctttcattgccttcctggaaaataataactaaactcttcctcaaaaaaaaaaaaaaa

SEQ ID NO: 285 - DNA, 631 bp, Homo sapiens
  misc_feature (609)..(609): n is a, c, g, or t
tttttttttttttttttaagacgttcaaatagagactgctgtccaattattgccaatgctagggaggggatttctgcctcagatggaggtagtgaggggtcagcaaagaatgtggattttagaactaggtagatttaacccaagtcctggttctatcattttctaacttaatggctttgctcaactcaccacacccctccgttctccccagtaaagtgaggacaatactaattgtctcacaatactgtgttgggtgttaaatgagaccacaaagtaaagtatcaaaggcagtgcctgtcccagagcaggtgacttgcactaatcagaggctcaccctgccttgctgctccacacacacgactgactgacaacatccgtgacccacaacatccacagctcattcccacggcagtcctcacgcaggcaccaaaactctaccccactcatgaaatcgacgtgaaatgcaaggaaatcagaatgtggttatctgaggtatcaactttaatcttctctggtttatttttttaaataaattagttacagagcgagactttaatcattatcagtagcagatttcactagcacaattatcaagtgtcagaaccccanaggtgagaatcgccctcgtgcc

SEQ ID NO: 286 - DNA, 3654 bp, Homo sapiens
atgtttctgtacaacttaaccttgcagagagccactggcatcagctttgccattcatggaaacttttctggaaccaaacaacaagaaattgttgtttcccgtgggaagatcttggagctgcttcgcccagaccccaacactggcaaagtacataccctactcactgtggaagtattcggtgttatccggtcactcatggcctttaggctgacaggtggcaccaaagactacattgtagttggcagtgactctggtcgaattgttattttggaataccagccatctaagaatatgtttgagaagattcaccaagaaacctttggcaagagtggatgccgtcgcatcgttcctggccagttcttagctgtggatcccaaagggcgagccgttatgattagtgccattgagaaacagaaattggtgtatattttgaacagagatgctgcagcccgacttaccatttcatctcccctggaagcccacaaagcaaacactttagtgtatcatgtagttggagtagatgtcggatttgaaaatccaatgtttgcttgtctggaaatggattatgaggaagcagacaatgatccaacaggggaagcagcagctaatacccagcagacacttactttctatgagctagaccttggtttaaatcatgtggtccgaaaatacagtgaacctttggaggaacacggcaacttccttattacagttccaggagggtcagatggtccaagtggagtactgatctgctctgaaaactatattacttacaagaactttggtgaccagccagatatccgctgtccaattcccaggaggcggaatgacctggatgaccctgaaagaggaatgatttttgtctgctctgcaacccataaaaccaaatcgatgttcttctttttggctcaaactgagcagggagatatctttaagatcactttggagacagatgaagatatggttactgagatccggctcaaatattttgatactgtacccgttgctgctgccatgtgtgtgcttaaaacagggttcctttttgtagcatcagaatttggaaaccattacttatatcaaattgcacatcttggagatgatgatgaagaacctgagttttcatcagccatgcctctggaagaaggagacacattcttttttcagccaagaccacttaaaaaccttgtgctggttgatgagttggacagcctctctcccattctgttttgccagatagctgatctggccaatgaagatactccacagttgtatgtggcctgtggtaggggaccccgatcatctctgagagtcctaagacatggacttgaggtgtcagaaatggctgtttctgagctacctggtaaccccaacgctgtctggacagtgcgtcgacacattgaagatgagtttgatgcctacatcattgtgtctttcgtgaatgccaccctagtgttgtccattggagaaactgtagaagaagtgactgactctgggttcctggggaccaccccgaccttgtcctgctccttattaggagatgatgccttggtgcaggtctatccagatggcattcggcacatacgagcagacaagagagtcaatgagtggaagacccctggaaagaaaacaattgtgaagtgtgcagtgaaccagcgacaagtggtgattgccctgacaggaggagagctggtctatttcgagatggatccttcaggacagctgaatgagtacacagaacggaaggagatgtcagcagatgtggtgtgcatgagtctggccaatgtaccccctggagagcagcggtctcgcttcctggctgtggggcttgtggacaacactgtcagaatcatctccctggatccctcagactgtttgcaacctctaagcatgcaggctctcccagcccagcctgagtccttgtgtatcgtggaaatgggtgggactgagaagcaggatgagctgggtgagaggggctcgattggcttcctatacctgaatattgggctacagaacggtgtgctgctgaggactgtcttggaccctgtcactggggatttgtctgatactcgcactcggtacctggggtcccgtcctgtgaagctcttccgagtccgaatgcaaggccaggaggcagtattggccatgtcaagccgctcatggttgagctattcttaccaatctcgcttccatctcaccccactgtcttacgagacactggaatttgcatcgggttttgcctcggaacagtgtcccgagggcattgtggccatctccaccaacaccctacggattttggcattagagaagctcggtgctgtcttcaatcaagtagccttcccactgcagtacacacccaggaaatttgtcatccaccctgagagtaacaaccttattatcattgaaacggaccacaatgcctacactgaggccacgaaagctcagagaaagcagcagatggcagaggaaatggtggaagcagcaggggaggatgagcgggagctggccgcagagatggcagcagcattcctcaatgaaaacctccctgaatccatctttggagctcccaaggctggcaatgggcagtgggcctctgtgatccgagtgatgaatcccattcaagggaacacactggaccttgtccagctggaacagaatgaggcagcttttagtgtggctgtgtgcaggttttccaacactggtgaagactggtatgtgctggtgggtgtggccaaggacctgatactaaacccccgatctgtggcagggggcttcgtctatacttacaagcttgtgaacaatggggaaaaactggagtttttgcacaagactcctgtggaagaggtccctgctgctattgccccattccaggggagggtgttgattggtgtggggaagctgttgcgtgtctatgacctgggaaagaagaagttactccgaaaatgtgagaataagcatattgccaattatatctctgggatccagactatcggacatagggtaattgtatctgatgtccaagaaagtttcatctgggttcgctacaagcgtaatgaaaaccagcttatcatctttgctgatgatacctacccccgatgggtcactacagccagcctcctggactatgacactgtggctggggcagacaagtttggcaacatatgtgtggtgaggctcccacctaacaccaatgatgaagtagatgaggatcctacaggaaacaaagccctgtgggaccgtggcttgctcaatggggcctcccagaaggcagaggtgatcatgaactaccatgtcggggagacggtgctgtccttgcagaagaccacgctgatccctggaggctcagaatcacttgtctataccaccttgtctggaggaattggcatccttgtgccattcacgtcccatgaggaccatgacttcttccagcatgtggaaatgcacctgcggtctgaacatccccctctctgtgggcgggaccacctcagctttcgctcctactacttccctgtgaagaatgtgattgatggagacctctgtgagcagttcaattccatggaacccaacaaacaaaagaacgtctctgaagaactggaccgaaccccacccgaagtgtccaagaaactcgaggatatccggacccgctacgccttctga

SEQ ID NO: 287 - DNA, 1146 bp, Homo sapiens
atgctgctctccatagggatgctcatgctgtcagccacacaagtctacaccatcttgactgtccagctctttgcattcttaaacctactgcctgtagaagcagacattttagcatataactttgaaaatgcatctcagacatttgatgacctccctgcaagatttggttatagacttccagctgaaggtttaaagggttttttgattaactcaaaaccagagaatgcctgtgaacccatagtgcctccaccagtaaaagacaattcatctggcactttcatcgtgttaattagaagacttgattgtaattttgatataaaggttttaaatgcacagagagcaggatacaaggcagccatagttcacaatgttgattctgatgacctcattagcatgggatccaacgacattgaggtactaaagaaaattgacattccatctgtctttattggtgaatcatcagctaattctctgaaagatgaattcacatatgaaaaagggggccaccttatcttagttccagaatttagtcttcctttggaatactacctaattcccttccttatcatagtgggcatctgtctcatcttgatagtcattttcatgatcacaaaatttgtccaggatagacatagagctagaagaaacagacttcgtaaagatcaacttaagaaacttcctgtacataaattcaagaaaggagatgagtatgatgtatgtgccatttgtttggatgagtatgaagatggagacaaactcagaatccttccctgttcccatgcttatcactgcaagtgtgtagacccttggctaactaaaaccaaaaaaacctgtccagtgtgcaagcaaaaagttgttccttctcaaggcgattcagactctgacacagacagtagtcaagaagaaaatgaagtgacagaacatacccctttactgagacctttagcttctgtcagtgcccagtcatttggggctttatcggaatcccgctcacatcagaacatgacagaatcttcagactatgaggaagacgacaatgaagatactgacagtagtgatgcagaaaatgaaattaatgaacatgatgtcgtggtccagttgcagcctaatggtgaacgggattacaacatagcaaatactgtttga

SEQ ID NO: 288 - DNA, 4509 bp, Homo sapiens
gagaactggggaaactggaatttcccgcggagctgacagcgcttgcgctccccctactcgttctaattccacgcgctccaaaatatccgccatggagaaatcttggccaggatgtccattctaggcccatcggtgctgtcttgctgaaggttgggtcaggcatctaaagggactgtggtaagggagggtgtgacacaggtgtaagctgccatcgtcatcatgaactttgagggtctggaccctggactggcagaatatgccccagccatgcattctgccctggaccctgtcttggatgcccacctgaacccaaatctgctacagaatgtggagctggacccagagggagtggccttggaggctcttcccgtccaggaatcagtgcacataatggaaggtgtctactctgaattgcacagcgtggtggctgaagtgggtgtacctgtttccgtctcccactttgacttgcacgaggagatgctgtgggtggggagccacgggggccatgccacttcattttttggcccagccttggagcgctactcatcctttcaagtcaatggcagtgatgatattcggcagatccagagcctggagaatggtatcctttttctcaccaagaacaacctcaagtatatggcccgtgggggcctcattatatttgattacctgctggatgagaatgaggatatgcacagtctcctactgactgacagcagcactctactcgttggtgggctgcagaatcacatactagagattgatcttaacactgtccaggagactcagaagtatgcagtagagacgcctggagtcaccatcatgagacagacaaatcgcttcttcttctgcggccacacgtctggcaaggtttccctgagagacctccgtacttttaaggtggaacatgagtttgatgccttctcaggaagtctgtcagactttgatgtgcatggcaacctgctagctgcctgtggcttctccagccgcctcactggcctggcctgcgaccgtttcctcaaggtgtatgatttgcgcatgatgcgtgccatcacaccacttcaagtacatgtggatcctgccttcttgcgcttcattcctacatatacttctcgtcttgctatcatctctcagtcagggcagtgccaattctgtgaacccacaggcctggccaacccagccgatatctttcatgtgaatcctgtggggcctctgctaatgacatttgatgtgtcagccagcaagcaggctctggcctttggggattctgagggctgtgtgcacctctggactgattccccggagccttccttcaacccctactcccgtgagactgagtttgctttgccgtgtctcgtggactcactgcctcctctggactggagccaggacctgctgcctctttccctcatccctgtcccactcaccactgacacacttctctctgattggcctgctgccaactctgctccagctcccaggcgagcaccacccgtggatgcagagattctgcgcaccatgaagaaggtgggcttcattggctatgcgcccaatccccgcaccaggctgcgcaatcagataccctacagactcaaggagtcagacagtgaatttgacagcttcagccaggtcactgagtcaccagtaggacgagaagaggaaccacatctccacatggtttctaagaaataccgcaaggtgaccatcaaatattccaagctagggctggaggactttgacttcaaacactacaataagaccttgtttgctggattagagccccacattcccaacgcctactgtaactgcatgatccaggtgctctatttcctggagcctgtacgctgtctaattcaaaaccacctttgccagaaggagttctgtctggcatgtgagctgggcttcctgtttcacatgttggacctctctcgtggtgacccttgccagggcaataattttcttcgggcattccgtactattcctgaggcctcagccctcggtctaatcctggctgactcagatgaggcctcaggcaagggcaatctggccaggctcattcagaggtggaatcgcttcattctcactcaactgcatcaagatatgcaggagctggaaataccacaggcttatcgaggtgctggaggcagcagcttttgctcatcgggggactctgttattgggcagctcttcagctgtgagatggagaactgcagcctctgccgctgtggcagtgagaccgtgcgagcctcatccactctgcttttcacactctcctaccctgatgataaaactgggaagaactatgactttgctcaggtgctgaagcgaagcatctgcctggaccagaatacacaggcctggtgtgacacctgtgaaaagtaccagcccacgattcagacccgcaacatccgccatctgccagatattcttgtcatcaattgtgaggtgaacagctcaaaagaggctgatttctggagaatgcaggctgaggttgccttcaagatggcagtaaagaaacacggtggggaaatctccaagaacaaggaatttgctttggctgattggaaggaactagggagtccagagggtgtgctggtgtgtccctccattgaggagttgaagaacgtctggcttcctttctccattcgcatgaagatgaccaaaaacaaagggctggatgtttgcaattggactgatggggatgagatgcagtggggcccagccagggcagaggaggagcatggtgtctatgtgtatgacctgatggctactgtggtacacatcctggactcacgcacagggggcagcctggtggctcacatcaaagttggagagacctaccaccagcgcaaggagggcgttactcaccagcagtggtatctgttcaatgactttcttattgaacctattgataagcatgaagctgtgcagtttgacatgaattggaaagtacctgcaatcctttattatgtcaaacggaatctcaattccagatacaacctgaacatcaagaaccctattgaggcaagtgtcttgctggctgaagcctcgctggcacggaagcagcggaaaacacatactacctttattccactgatgctgaatgagatgccacagattggggacctggtgggtctggatgctgagtttgtcacccttaatgaggaggaagcagagttacgcagtgatggtaccaagtctaccattaaaccaagccagatgtcagtagccaggattacctgtgttcggggccagggacccaatgagggtatccccttcattgatgactacatctctacccaggagcaggtggtggattacttgactcaatactcgggtataaagcctggtgacctcgatgccaaaatttcctccaagcacctaacaactctcaagtctacctacttaaagcttcgttttctcattgacattggagtcaagtttgtgggtcatggcctgcagaaggacttccgggtcatcaacctgatggtgcccaaggaccaagtccttgacactgtctacctgttccatatgccccgaaaacgaatgatttccctgcgattccttgcttggtactttctggacctgaagattcaaggggaaacccatgacagtattgaggatgcccgcacagcccttcagctgtaccgaaagtatctggagctaagcaaaaatggcactgagcctgagtctttccacaaggtgctcaagggtctttatgagaagggcagaaagatggactggaaggtgcctgagcctgagggccaaacaagtcccaagaatgcagctgtcttctcctcagtgctggcgctctgactacccttcccaaagaaccacggccctctccctttactgttctatagccccagaactgggagatggcttcctaagttggctataccttgtccacttccagtactggacgtgctcagggtctagggtcacagatggtgctattaattgaactggaacacagcagaattgttgcaaaggttctaggagccagattcattccttcttcattctttgcaaaacagtggtacagacatggagtctagaattgacccagatggaaagtaattggtattcttaatatcctgggtgactaatatccaggcagagaagctcctggaaccataactgtaagttcctagctggctagggattgaagtcctggacagtgacagaggataccacagtagttcaagacttagcacaagtcaccaactgcttcagggatacctggaggggccagcaagtagagtgttggtggcccaagcaaaccagtgttgccaataccattgccaaaagggcctttggatcctggacaaagcttggctgccggcttcatttattcctgctgatggctgagaagcatctgtcttccatcccacttgcctgtcccaagttttgttccattttttaaaaatttgttgtaaactgcatgttttataaaataaaaataaaatatcgtttgttatttatctcaaaaaaaaaaaaaaaaaaaaa

SEQ ID NO: 289 - DNA, 10537 bp, Homo sapiens
aagcgcgggggagggagtgtaaatagagcgaaggctgctctgtgtcagccccgtcaccgccgggcggcccgcgcggagtctgagggagatggaagttgagcaagagcagcggcgcagaaaggtggaggccgggaggacgaagcttgctcacttccgacagagaaaaacaaaaggtgacagttcgcattcggagaaaaagacggcgaagaggaagggctcggctgtcgatgcgtctgtccaggaggagagtccggtaaccaaggaggacagcgcactctgtggaggaggggacatttgcaaaagcacatcatgtgacgacacccctgatggggcaggaggggcctttgcagctcagccggaggactgtgatggagagaagagagaggacttggaacagctgcagcagaagcaagtcaatgaccatcctccagagcagtgtgggatgttcacagtcagtgaccacccaccagaacagcatgggatgttcacagtcggtgaccacccaccagaacagcgtgggatgttcacagtcagtgaccacccaccagaacagcatgggatgttcacagtcagtgaccacccaccagaacagcgtgggatgttcacaatcagtgaccaccaaccggaacagcgtgggatgttcacagtcagtgaccacacaccagaacagcgtgggatcttcacaatcagtgaccacccagcagaacagcgtgggatgttcacaaaggagtgtgaacaagaatgtgaacttgccattactgacctggagagcggccgtgaagatgaggctggcctgcatcagagtcaggccgtgcatggccttgagctggaggcgctgcgcctgagtctgagcaacatgcacacggcgcagctggagctgacacaggccaacctccagaaggagaaggagacggcattgacggagctgcgggagatgctcaacagccggcgtgcccaggagctggccctgctacagagcaggcagcagcacgagctggagctcctcagggagcagcacgcacgggagaaggaggaggtggtgctcaggtgtggacaggaagcagctgagctgaaggagaagttacaatcagaaatggagaaaaacgcccagatagtaaagaccctgaaggaagattgggaatctgaaaaagatttatgtttagaaaatctacgcaaagaactgtctgcaaagcatcaatcagaaatggaggatttacaaaaccagtttcagaaagaattggcagaacagagagctgagttggagaagatttttcaagacaaaaaccaggctgaacgggcccttaggaacctggagagtcatcatcaagcagccattgagaagttacgtgaagacctgcagtccgagcacggccggtgtttagaagacttggagttcaagttcaaagagagcgagaaagaaaaacagctggagttagagaatcttcaagcatcatatgaagacctgaaggcacaatcacaagaagagatcaggcgcttgtggtcccagcttgattctgccaggaccagtagacaggaattgagtgagctacatgagcaactcctggcgcgcacctctcgtgtggaagatttagaacagctgaagcagcgagaaaaaacccagcatgagtccgaactggagcaactgaggatttattttgaaaagaagttaagggatgctgagaaaacttaccaagaagacctaaccctgttacagcagaggctgcagggggcgagggaagatgctcttctggactctgtggaagttgggttgtcctgtgtgggtttagaagagaaacctgagaaaggaagaaaagatcacgttgatgaactcgagcctgagcgacataaggagagcctgccacgcttccaggcggagttagaagaaagccacaggcaccagctggaagcgctggagtctcccctctgcatccagcacgaggggcatgtctcagacagatgctgcgtagagacttcagcattgggacacgagtggcgtctggaaccctctgaagggcacagccaagagcttccctgggtgcatctccagggtgtgcaggacggggacttggaggccgacacagagcgggcagccagagtcttgggtctggaaactgagcacaaggtgcaactttcgcttcttcagactgagctcaaagaagaaattgaactcctaaaaatagaaaatagaaatttgtatgggaagttgcagcatgaaactcgtctgaaggacgatttggagaaggtaaaacacaatctaattgaagaccaccagaaggaactaaataatgctaagcaaaagactgagctgatgaaacaggaattccaaagaaaagaaacggactggaaagttatgaaggaggagctacagcgggaagctgaggagaagttaacattgatgctacttgaactgagagaaaaggctgaatccgagaaacagaccatcataaacaagtttgagcttcgagaagctgaaatgaggcagcttcaggaccaacaggcagcccagatcctggatctggagaggtccttgacggagcagcagggccgcctgcagcagctggaacaggacctcacttcagacgacgccctgcattgcagccagtgtgggcgggagccgcccacagcccaggacggggagcttgctgcgctccacgtgaaggaagactgcgccctgcagctgatgctggcccggagcaggtttttagaggaacgtaaagagatcaccgagaaattcagtgcggaacaagatgccttcctgcaggaggcccaggagcagcatgcccgtgagctgcagctcctccaggagagacaccagcagcagctcctgtcagtgacggcggagctcgaggccagacaccaggccgcgttgggcgagctgacagcctccttagagagcaagcagggggctctgctggctgcacgtgtggccgaactgcagacaaaacacgctgccgacctcggcgctctggagaccagacatctgtccagccttgattctttggaatcctgttacctctctgaatttcagaccatccgtgaggagcacaggcaggccctagagctcttacgagcagactttgaggaacaactgtggaaaaaggactctcttcaccaaacgattttgactcaagagttggagaaactgaagcggaaacacgaaggggagctacagtctgtgcgggaccacctgcgaaccgaagtgagcacagagctcgccggaaccgtggctcacgagctgcagggagtgcaccagggtgaatttggaagtgaaaagaaaactgctttgcatgaaaaagaggagacacttcggcttcagagtgcacaggcacagccttttcaccaagaggagaaagagtctttgtctctgcagcttcaaaagaagaatcaccaagtccagcagctgaaagaccaggttttatccttaagtcacgagatagaagagtgccgctccgagttggaggtgctgcagcagaggcgggagcgggagaaccgggaaggcgcaaacctcctctccatgctcaaggccgacgtcaacctgtcccacagcgaaagaggggccctccaggacgccctgcgcaggctgctgggtttgtttggagagacgctgagggcagccgtcaccctgaggagccggatcggggagcgcgtggggctctgcctggatgacgcgggcgcaggcctggccctgtcgacagctctggcgctggaggagatgtggtctgatgtggccctcccggagttggacagaactttgtctgaatgtgcagagatgtcttccgtggctgaaattagcagccacatgtgtgaaagctttctcatgagcccagaaagtgtacgggagtgtgagcaacccatccggagggtcttccagagcctcagcctggccgtggacggcctcatggagatggccctggactccagcagccagctggaagaagcacgccaaattcattctcgttttgaaaaagaatttagttttaagaatgaggagacagcacaggttgtcaggaagcaccaggagctgctggagtgtttgaaggaggagagcgcagcaaaggcagagctggcgctggagctgcacaagactcagggtacccttgagggattcaaggtggagacagcagatctgaaggaggtgctggccgggaaggaggattccgagcaccgtctggtgctggagctggagagcctgagacggcagctgcagcaggcggcccaggagcaggcggcgctgagggaggagtgcacccgtctgtggagtcggggggaggccacagccacggacgccgaggccagagaagctgctctccggaaggaagtggaggatctgaccaaagaacagtcggagaccaggaagcaggctgagaaggaccgctcagccctgctctcccagatgaagattttggagtctgagttagaagaacagctgtctcagcatcgcgggtgtgccaagcaggcggaggccgtcactgccctggaacagcaggtggcatctctggacaagcatttgcgcaaccagcggcaattcatggatgagcaggcagccgagcgggagcacgagcgcgaggagttccagcaggagattcagaggctggaggggcagctccgccaggcggccaagccgcagccctggggccctcgcgacagccagcaggcgccgctggatggagaggttgagttgttacaacaaaagttgagagaaaagttggatgaatttaatgaattggctatacagaaagagtcggcagatagacaagtgttaatgcaggaagaagaaattaaacgtctggaggagatgaacatcaacatcaggaaaaaagtggcccagctccaggaagaagtggaaaaacagaaaaacatcgtgaaagggctggaacaggataaagaggtgttaaagaaacagcagatgagtagcttgcttctggcgtccacgttgcagtctacactagatgcaggcagatgtcccgagcctccttcgggcagccctcctgagggtccagaaatacagttagaggtgacacagagagcactcctgcggcgcgagagcgaggttttggacttaaaagaacagctagaaaagatgaaaggtgacttagaaagtaaaaatgaagaaatactacatctgaacttaaaattggacatgcagaacagccagactgctgtcagcctcagagaacttgaggaagagaacacgagcttgaaggtcatatataccagaagttctgagattgaagagctgaaagccactattgaaaatctgcaagagaatcagaaacgattacaaaaggagaaagcagaggaaattgaacaactccatgaagtcattgagaagctgcagcacgagctgtccctcatggggcctgtggtgcacgaagtcagcgacagtcaggctggcagtctgcagagcgagctgctctgctcccaggccgggggccctcgtgggcaggccctacagggcgagctcgaggctgcgctggaagccaaggaggccctgagccggctgctggctgaccaggagcgcaggcacagccaggccctggaggccctgcagcagcgcctccagggcgcagaggaggctgcggagctacagctggctgagctggagcgcaatgtagccctcagggaggctgaggtcgaagacatggcctcccggatccaggagttcgaagcggccctgaaagcaaaggaagcgacgattgccgagagaaatttagaaatcgacgctctgaaccagcggaaggcggcccactctgccgagctggaggccgtcctgttggccttggcccgcatccgccgcgccctggagcagcagcccctggcagccggggcggcgcctcccgagctgcagtggctccgagcgcagtgtgcccgcctcagccgccagctgcaggtgctgcaccagcggttcctgaggtgccaggtggagctggacaggcggcaggcccgcagagccacagctcacacacgggtgcccggggcccacccacagcctcgcatggatggtggcgccaaggcccaggtcaccggcgacgtggaggcctcccatgatgctgctttggagccggttgtccctgacccacagggtgatctgcagcctgtcctggtgacgttgaaggatgcacctctctgcaagcaagaaggcgtgatgtcagtgctcaccgtctgccagaggcagctgcagtcggagctgctcttggtgaaaaatgaaatgcgcctgagtctggaggacggcggcaagggtaaagaaaaagtactggaagattgtcagctgccgaaggtcgatctcgtagctcaggtgaaacagcttcaggaaaaactgaaccgtttgctgtattccatgaccttccagaatgtggatgctgccgacaccaaatctctgtggcccatggcctcagcacacctgttggagagcagctggagtgatgattcctgtgacggagaagagcctgacatatcaccccacatagacacatgtgatgccaatacagccacggggggtgtaactgatgttatcaaaaatcaggccatagacgcgtgtgatgccaatacaaccccagggggtgtaactgatgttatcaaaaattgggattccttgataccagatgaaatgccagattctcccattcaagaaaaatcagaatgtcaggacaggtctctttcttcaccgaccagcgtacttggtggctcccgccaccagagccacactgcagaggctgggccccggaagagcccggtcgggatgctggacctgtcttcctggagctcccctgaggtcctcaggaaggactggaccctggagccctggcccagcctccccgtgacaccccactcaggagccctgagcctgtgcagtgccgacacatccctgggggacagggcggacacctcgctgccacagacccaggggccggggctgctttgttccccaggcgtgtctgcagcagcgctggcactgcagtgggccgagtctccgccggctgacgaccaccatgtgcagaggacggctgtggagaaagatgtcgaagattttatcacaacatcctttgattctcaagaaacattaagttcacctcctcctggattagaaggaaaagctgatagaagtgagaaaagtgacggctcgggttttggagcaagactgagcccggggtcaggaggccctgaggctcaaactgctggtcctgtgacccctgcttccatctctggaaggtttcagccgctgccggaagccatgaaggagaaggaagtgcgtccgaagcacgtgaaggctttactgcagatggtgcgtgacgagagccaccagatcctggcgctgtcagaaggccttgcacccccaagcggcgagccacacccaccccggaaggaagacgagatacaggacatctcgctccatgggggaaagacgcaggaagtgcccaccgcgtgccccgattggagaggggaccttctgcaggttgtgcaagaggcctttgaaaaagagcaggagatgcagggggttgagctgcagccccgactcagtggctcagatctggggggtcacagctccctgctcgaaaggctggagaagatcatccgtgagcagggagacctgcaggaaaagtccctggagcatcttcgcttgccggaccggagcagcctgctgtccgagatccaggcgctgcgtgcccagctgcgcatgacgcacctgcagaaccaggagaagctgcagcacttgcgcacggcgctgacaagcgcagaggcgcgcgggagccagcaggagcaccagctgcgcaggcaggttgaactgctggcttataaagtagagcaggagaagtgcattgctggtgacttgcagaagacgctgagtgaagagcaagagaaggcaaacagcgtgcagaagctcctggcggcggagcagactgtagtgcgagatttgaagtccgacctctgtgagagcaggcagaagagcgaacagctgtcccggtccctctgcgaggtgcagcaggaggtcctccagctgagatccatgctgagcagtaaggagaacgagctgaaggccgcgcttcaggagctggagagtgagcaggggaaggggcgtgccctgcagagccagctggaggaggagcagctgcggcacctgcagagggagagccagagtgccaaggccctggaggagctgcgggcgtctttggagacacagcgtgctcagagcagtcgactctgcgtggcactgaaacacgagcagacggccaaggacaacctgcagaaggagctgcgtatcgagcactcacgctgcgaggccttgctggctcaggagcggagccagctctctgagctccagaaggaccttgcggctgagaagagccgcaccctggagctgtcagaggccttgcggcacgagcggctcctgaccgagcagctgagccagaggacacaggaggcttgcgtgcaccaggacacacaggcccatcacgctctgctgcagaagctgaaggaggagaagtcccgggtggtggacttgcaagcgatgcttgaaaaggtgcagcagcaagccctgcattctcagcagcagcttgaggctgaggctcagaagcactgtgaggcgctcaggagagagaaggaggtaagtgccacactgaagtcgacggtggaagccctgcacacccaaaaacgagagctgagatgctctctggagagagagagggagaaaccagcgtggttgcaggcagaattagagcagtcacacccacggttgaaagagcaagaaggacgcaaggctgcgaggaggagcgcggaggccaggcagagcccagcggctgcggagcagtggaggaagtggcagagagacaaggagaagctgcgagaattagaactgcagcgtcagcgtgacttgcataagatcaagcagcttcagcagacagtgagagacctggagtcgaaggacgaggtgcctggcagccgcctccacctaggttctgcccgcagggctgccggctcggatgcggaccacctccgggaacagcagcgagagctggaggcgatgaggcagcggctgctctctgccgcccggcttctcaccagcttcaccagccaggccgtggacaggacagttaatgattggacgtcatccaatgagaaagcagtgatgtctttactgcacacgttggaggagctgaagtctgacttgagcaggcccacctcctcccagaaaaaaatggcagcagagctgcagttccagtttgtggacgtcctgctgaaagacaatgtttccctcacaaaagcgctcagcacggtgacccaggagaagctggagctgagcagagccgtgtctaagcttgagaagttgctgaagcaccatctgcagaagggctgcagcccaagcaggtcggaaaggtctgcttggaagccagacgaaacggctccacagagttccctgaggcgcccagaccccggccggcttccaccagctgccagcgaggaagcacacaccagcaatgtcaagatggaaaaattgtacctgcattacttgagagcagagagctttagaaaagctctgatttatcaaaagaagtatcttttgctgttgattggtggattccaggattctgaacaagaaacactctccatgattgcccatttgggggtatttccttccaaagcagaacggaaaatcacatctcgtcctttcaccaggttccgcacggccgtcagggtggtcattgcaatattaagattacgttttttggttaagaaatggcaagaagtagatcggaaaggagctctggcacaaggcaaagcccctcgcccagggccccgagcacgacagccgcagtctccacccagaaccagagagtcccccccaacccgggatgtaccctctggccacaccagggaccctgccagaggccgcagactggcagcagcagcctccccacacagtgggggaagagccactccatccccaaattcaagattagaaagatccctgactgcttctcaagatccagaacattccttgacagagtatattcaccatttagaagtgatccagcaaagattgggaggggtactaccagattctacttcaaagaaatcctgccacccgatgattaaacagtgaataaaatgtcatggctctttcctgcgacaattctatttgaggaaaagatttgtttttcccttttcccaaggaagctcgtgggacagcatgggcactactcttcatgtgcggtgacaccagcccccagatgccttgaattaagtgtcctcacctttatgcatgactgcaaagccagctggagcattttctatggagcctccgtatgttttaggcccatgaccttcgtgaggtgacgggcactcactcccatgagccctggctgtgtgctgttgtgtgcctatcggcagatccatccttcctgcctccaaggaggatacacagagaatggcttcctgttgttttgtttattttcttaacgtgtacagatggaaacttcatttaaaaataaaaacaaaacaactcaaaaaggaataaaatttaatcactgttttgtttgtg

SEQ ID NO: 290 - DNA, 1863 bp, Homo sapiens
atgctttccgccatctacacagtcctggcgggactgctgttcctgccgctcctggtgaacctctgctgcccatacttcttccaggacataggctacttcttgaaggtggccgccgtgggccggagggtgcgcagctacgggaagcggcggccggcgcgcaccatcctgcgggcgttcctggagaaagcgcgccagacgccacacaagccttttctgctcttccgcgacgagactctcacctacgcgcaggtggaccggcgcagcaatcaagtggcccgggcgctgcacgaccacctcggcctgcgccagggagactgcgtggcgctccttatgggtaacgagccggcctacgtgtggctgtggctggggctggtgaagctgggctgtgccatggcgtgcctcaattacaacatccgcgcgaagtccctgctgcactgcttccagtgctgcggggcgaaggtgctgctggtgtcgccagaactacaagcagctgtcgaagagatactgccaagccttaaaaaagatgatgtgtccatctattatgtgagcagaacttctaacacagatgggattgactctttcctggacaaagtggatgaagtatcaactgaacctatcccagagtcatggaggtctgaagtcactttttccactcctgccttatacatttatacttctggaaccacaggtcttccaaaagcagccatgatcactcatcagcgcatatggtatggaactggcctcacttttgtaagcggattgaaggcagatgatgtcatctatatcactctgcccttttaccacagtgctgcactactgattggcattcacggatgtattgtggctggtgctactcttgccttgcggactaaattttcagccagccagttttgggatgactgcagaaaatacaacgtcactgtcattcagtatatcggtgaactgcttcggtatttatgcaactcaccacagaaaccaaatgaccgtgatcataaagtgagactggcactgggaaatggcttacgaggagatgtgtggagacaatttgtcaagagatttggggacatatgcatctatgagttctatgctgccactgaaggcaatattggatttatgaattatgcgagaaaagttggtgctgttggaagagtaaactacctacagaaaaaaatcataacttatgacctgattaaatatgatgtggagaaagatgaacctgtccgtgatgaaaatggatattgcgtcagagttcccaaaggtgaagttggacttctggtttgcaaaatcacacaacttacaccatttaatggctatgctggagcaaaggctcagacagagaagaaaaaactgagagatgtctttaagaaaggagacctctatttcaacagtggagatctcttaatggttgaccatgaaaatttcatctatttccacgacagagttggagatacattccggtggaaaggggaaaatgtggccaccactgaagttgctgatacagttggactggttgattttgtccaagaagtaaatgtttatggagtgcatgtgccagatcatgagggtcgcattggcatggcctccatcaaaatgaaagaaaaccatgaatttgatggaaagaaactctttcagcacattgctgattacctacctagttatgcaaggccccggtttctaagaatacaggacaccattgagatcactggaacttttaaacaccgcaaaatgaccctggtggaggagggctttaaccctgctgtcatcaaagatgccttgtatttcttggatgacacagcaaaaatgtatgtgcctatgactgaggacatctataatgccataagtgctaaaaccctgaaactctga

SEQ ID NO: 291 - DNA, 890 bp, Homo sapiens
  misc_feature (31)..(31): n is a, c, g, or t
  misc_feature (40)..(40): n is a, c, g, or t
  misc_feature (577)..(577): n is a, c, g, or t
  misc_feature (863)..(863): n is a, c, g, or t
cagccagtgtccactcctgctcactttgggnacatctgtngagcagggtgcctcctttttgtccctccaagagacagttgggggacttggcctctggccgcctcaagttgggtcagcacctgctgggcctcatcctggttcatcgtgcatcaatgggagcgcacctgggttctgctgacatgtgagagcttcttcaccgaggggttcagaaaagtgtgctcatggcctgtaggtctggattcaaagggagatgagaaaaataggaactgagcccgtggcttgcctcacccacttcctgagcctgcgcaagggacaagactttcctgtgtggccttcttacggcagtccacagggaagtggcctcattttctgtgtctgtcctgcccagcgcccccactctcctgtgctggtcccaggccatcccttagccagagtgcagaactccagacccccaatattctctcatatcctcagaatcttcagcttccatccatggatgttggctgaatcctgagtggggtcgtagaaagatctggtcctgtgagtaggggggcgaggaggaaagcacggacttcanctgggctgtctacaacctgagtcttaaacacctaaagacaagcacaacttgcccccgcttggacgaatttcttgctccagaccgcctcactgcatctctagggccatgtgtattcctgctatttggccccctttcttgagaaaaattgcctattaaaagaatttccttattcaaaaaaaaacaaaaaaatggcctccttggccctccccggaggagctctgcgggcgccttcccttaggggaggctaattcaatgaccctgcctcactacctcgcttgccctcggncgatccactggggagagaaggtatcac

SEQ ID NO: 292 - DNA, 1212 bp, Homo sapiens
atgacagccatcatcaaagagatcgttagcagaaacaaaaggagatatcaagaggatggattcgacttagacttgacctatatttatccaaacattattgctatgggatttcctgcagaaagacttgaaggcgtatacaggaacaatattgatgatgtagtaaggtttttggattcaaagcataaaaaccattacaagatatacaatctttgtgctgaaagacattatgacaccgccaaatttaattgcagagttgcacaatatccttttgaagaccataacccaccacagctagaacttatcaaacccttttgtgaagatcttgaccaatggctaagtgaagatgacaatcatgttgcagcaattcactgtaaagctggaaagggacgaactggtgtaatgatatgtgcatatttattacatcggggcaaatttttaaaggcacaagaggccctagatttctatggggaagtaaggaccagagacaaaaagggagtaactattcccagtcagaggcgctatgtgtattattatagctacctgttaaagaatcatctggattatagaccagtggcactgttgtttcacaagatgatgtttgaaactattccaatgttcagtggcggaacttgcaatcctcagtttgtggtctgccagctaaaggtgaagatatattcctccaattcaggacccacacgacgggaagacaagttcatgtactttgagttccctcagccgttacctgtgtgtggtgatatcaaagtagagttcttccacaaacagaacaagatgctaaaaaaggacaaaatgtttcacttttgggtaaatacattcttcataccaggaccagaggaaacctcagaaaaagtagaaaatggaagtctatgtgatcaagaaatcgatagcatttgcagtatagagcgtgcagataatgacaaggaatatctagtacttactttaacaaaaaatgatcttgacaaagcaaataaagacaaagccaaccgatacttttctccaaattttaaggtgaagctgtacttcacaaaaacagtagaggagccgtcaaatccagaggctagcagttcaacttctgtaacaccagatgttagtgacaatgaacctgatcattatagatattctgacaccactgactctgatccagagaatgaaccttttgatgaagatcagcatacacaaattacaaaagtctga

SEQ ID NO: 293 - DNA, 963 bp, Homo sapiens
atgcctactggagactttgattcgaagcccagttgggccgaccaggtggaggaggagggggaggacgacaaatgtgtcaccagcgagctcctcaaggggatccctctggccacaggtgacaccagcccagagccagagctactgccgggagctccactgccgcctcccaaggaggtcatcaacggaaacataaagacagtgacagagtacaagatagatgaggatggcaagaagttcaagattgtccgcaccttcaggattgagacccggaaggcttcaaaggctgtcgcaaggaggaagaactggaagaagttcgggaactcagagtttgacccccccggacccaatgtggccaccaccactgtcagtgacgatgtctctatgacgttcatcaccagcaaagaggacctgaactgccaggaggaggaggaccctatgaacaaactcaagggccagaagatcgtgtcctgccgcatctgcaagggcgaccactggaccacccgctgcccctacaaggatacgctggggcccatgcagaaggagctggccgagcagctgggcctgtctactggcgagaaggagaagctgccgggagagctagagccggtgcaggccacgcagaacaagacagggaagtatgtgccgccgagcctgcgcgacggggccagccgccgcggggagtccatgcagcccaaccgcagagccgacgacaacgccaccatccgtgtcaccaacttgtcagaggacacgcgtgagaccgacctgcaggagctcttccggcctttcggctccatctcccgcatctacctggctaaggacaagaccactggccaatccaagggctttgccttcatcagcttccaccgccgcgaggatgctgcgcgtgccattgccggggtgtccggctttggctacgaccacctcatcctcaacgtcgagtgggccaagccgtccaccaactaa

SEQ ID NO: 294 - DNA, 617 bp, Homo sapiens
  misc_feature (586)..(586): n is a, c, g, or t
tttctctgggtcataaaatatgggggtagcaggaggaaagagaagagtatattaagagcctatatctgagaggtacgttcagtttttcctcaaaagtatctggtggttggactagtaatttattcatttattgagaacctattaaattacagaaaatacttagtaaagagcggtgagaaagatagaaactatccctgtcctttacctggattgaaatctaaagtggatatttgtacaataaactcacaaactaaagaaagaaacgtaagtctgaaggtcacgtttttcttttaaccggcttttgatgggactgaatttaaattgccaaaaggtgaattaacataatcttgaaaacttgcaagttcctggaggcagttctggagggagggtggagcaaaagagatggcagaagaagaggagccagcagcactggaattcaaaagtagacattcttgcctcctccctagtggacagggaggaggggtggggagagcacaagagagccgtgacagaggaagggagagagcacagagtttaagtctatattgatggaactatggttacaaataggggctcccatttatanctcatctggcatgtctcatcagtgtttacaa

SEQ ID NO: 295 - DNA, 1843 bp, Homo sapiens
ctaatgaactcctgggtcacgtggtgcgcacgcgccaaaggcacacgataaaggaaaacgcgggcttatcgtggcctttaaaatccggcttggtgagcttgggtcgcctctgaaggagaaccattttccatctctttcatagttttttcccccagtcagcgtggtagcggtattctccgcggcagtgacagtaattgtttttgcctctttagccaagacttccgccctcgatcaagatggtggttggacggccttcctaacctttacggggcctggcggtgctgacgcctgagctggtaggggtggagcaggtaggaaacagcaaatgcagaagctgctgcgcggaagtcggccatggactggaaagaagttcttcgtcggcgcctagcgacgcccaacacctgtccaaacaaaaaaaaaagtgaacaagaattaaaagatgaagaaatggatttatttacaaaatattactccgaatggaaaggaggtagaaaaaacacaaatgaattctataagaccattccccggttttattataggctgcctgctgaagatgaagtcttactacagaaattaagagaggaatcaagagctgtctttctacaaagaaaaagcagagaactgttagataatgaagaattacagaacttatggtttttgctggacaaacaccagacaccacctatgattggagaggaagcgatgatcaattacgaaaactttttgaaggttggtgaaaaggctggagcaaagtgcaagcaatttttcacagcaaaagtctttgctaaactccttcatacagattcatatggaagaatttccatcatgcagttctttaattatgtcatgagaaaagtttggcttcatcaaacaagaataggactcagtttatatgatgtcgctgggcaggggtaccttcgggaatctgatttagaaaactacatattggaacttatccctacgttgccacaattagatggtctggaaaaatctttctactccttttatgtttgtacagcagttaggaagttcttcttctttttagatcctttaagaacaggaaagataaaaattcaagatattttagcatgcagcttcctagatgatttattggagctaagggatgaggaactgtccaaggagagtcaagaaacaaattggttttctgctccttctgccctaagagtttatggccagtacttgaatcttgataaagatcacaatggcatgctcagtaaagaagaactctcacgctatggaacagctaccatgaccaatgtcttcttagaccgtgttttccaggagtgtctcacttatgatggagaaatggactataagacctacttggactttgtccttgcattagaaaacagaaaggaacctgcagctctacaatatattttcaaactgcttgatattgagaacaaaggatacctgaatgtcttttcacttaattatttctttagggccatacaggaactaatgaaaatccatggacaagatcctgtttcatttcaagatgtcaaggatgaaatctttgacatggtaaaaccaaaggatcctttgaaaatctctcttcaggatttaatcaacagtaatcaaggagacacagtaaccaccattctaatcgatttgaatggcttctggacttacgagaacagagaggctcttgttgcaaatgacagtgaaaactctgcagaccttgatgatacatgatctctgaaagactagactgtcttatattatgagatacttgaatgctgcatgtaaagcctttaaagcaaaatcctcagaaatggtctaaataaaacacttgatatgcctagagaacacaaaaaaaaaa

SEQ ID NO: 296 - DNA, 3672 bp, Homo sapiens
atgcggaggctggcggccgaggagctgggggtcgtcaccatgcagcggatattcaactcctttgtttacactgagaaaatctcaaatggagaaagtgaagtacagcagctagccaaaaaaatccgagagaagttcaaccgttacttggatgtggtcaatcggaacaagcaagttgtagaagcatcctatacggctcacctaacctctcccctaactgcaattcaagactgctgtactatcccaccttccatgatggaattcgatgggaactttaataccaatgtgtctagaacaattagttgtgatcgactttctactactgttaatagccgggccttcaatccaggacgagacttaaattcagttcttgcagacaacctgaaatccaaccctggaattaagtggcaatatttcagttcagaagaaggaattttcactgttttcccagcacacaagttccggtgtaagggcagctacgaacaccgcagtagacccatctacgtctctacagtccggccgcagtcaaagcacatagtagtgattctggaccacggggcttcagtcacagacactcagcttcagattgccaaggacgctgctcaggtcatcctcagcgccatcgatgaacatgacaagatttctgtgttaactgtggcagataccgtccggacttgctcactagaccagtgctataagaccttcttgtctccagccaccagtgagacaaaaaggaaaatgtccacctttgttagcagcgtgaagtcttcagacagtcctacccagcacgcagtgggattccaaaaggcatttcagctgattcgaagtacaaacaataacacaaagttccaagcaaatacagacatggtcatcatttacctgtcagctggcattacatcaaaggactcttcggaagaagataaaaaagcgactctccaagtcatcaatgaagaaaatagctttctaaacaactctgtaatgattctcacctatgccctcatgaacgatggggtgactggtttgaaagagctggcttttctgagggatctagctgaacagaattcagggaagtacggtgtgccagaccggatggccttgcctgtgattaagggcagcatgatggtgctgaatcagttgagcaacctggagaccacagtgggcaggttctacacaaaccttcccaaccggatgattgatgaagccgtcttcagcctgcccttctctgatgagatgggagatggtttgataatgactgtgagtaaaccctgttattttggaaacctacttctgggaattgtaggtgtggacgtgaatctggcttacattcttgaagacgtgacgtattaccaagactctttggcttcctatacttttctcatagacgacaaaggatatacacttatgcacccatctcttaccaggccatatttattgtcagagcccccacttcatactgacatcatacattatgaaaatattccaaaatttgaattagttcggcaaaatatcctaagcctccctctgggcagccagattatcgcagtccctgtgaactcatccctgtcttggcacataaacaagctgagagaaactggaaaggaagcctacaatgttagctatgcctggaagatggtacaagacacttcctttattctgtgtattgtggtgatacaaccagaaatacctgtgaaacaactgaagaacctcaacactgttcccagcagcaagctgctgtaccaccggctggatctccttggccagcccagtgcttgcctccacttcaaacagctggcaaccctagaaagtcccaccatcatgctgtctgctggcagcttttcctccccctatgagcacctcagccagccagagacaaagcgcatggtagagcactacaccgcctatctcagcgacaacacccgcctcattgctaacccgggcctcaaattctctgtcagaaatgaagtaatggctaccagccacgtcacagatgaatggatgacacaaatggaaatgagtagcctgaacacttacattgtccgccgttacatagcaacacccaatggcgtcctcagaatttatcctggttccctcatggacaaagcatttgatcccactaggagacaatggtatctccatgcagtagctaatccagggttgatttctttgactggtccttacttagatgttggaggagctggttatgttgtgacaatcagtcacacaattcattcatccagtacacagctgtcttctgggcacactgtggctgtgatgggcattgacttcacactcagatacttctacaaagttctgatggacctattacctgtctgtaaccaagatggtggcaacaaaataaggtgcttcataatggaggacaggggttatctggtggcgcacccgactctcatcgaccccaaaggacatgcacctgtggagcagcagcacatcacccacaaggagcccctggtagcaaatgatatcctcaaccaccccaactttgtaaagaaaaacctgtgcaacagcttcagtgacagaacggtccagaggttttataaattcaacaccagccttgcgggggatttgacgaaccttgtgcatggcagccactgttccaaatacagattagcaaggatcccaggaaccaacgcgtttgttggcattgtcaacgaaacctgcgactctcttgccttctgtgcctgcagcatggtggaccgactctgtctcaactgtcaccgaatggaacaaaatgaatgtgaatgtccttgtgagtgccctctagaggtcaatgagtgcactggcaacctcaccaatgcagagaaccgaaaccccagctgcgaggtccaccaggagccggtgacatacacagctattgaccctggcctgcaagatgctcttcaccagtgtgtcaacagcaggtgcagtcagaggctggaaagtggggactgttttggggtgctggattgtgaatggtgcatggtggacagtgatggaaagactcacctggacaaaccctactgtgccccccagaaagaatgcttcggggggattgtgggagccaaaagtccctacgttgatgacatgggagcaataggtgatgaggtgatcacattaaacatgattaaaagcgcccctgtgggtcctgtggctggagggatcatgggatgcatcatggtcttggtcctggcggtgtatgcctaccgccaccagattcatcgccggagccatcagcatatgtctcctcttgctgcccaagaaatgtcagtgcgtatgtccaacctggagaatgacagagatgaaagggacgacgacagccacgaagacagaggcatcatcagcaacactcggtttatagctgcggtcatcgaacgacatgcacacagtccagaaagaaggcgccgctactggggtcgatcaggaacagaaagtgatcatggttacagcaccatgagcccacaggaggacagtgaaaatcctccatgcaacaatgaccccttgtcagccggggtcgatgtgggaaaccatgatgaggacttagacctggataccccccctcagactgctgccctactaagtcacaagttccaccactaccggtcacaccaccctacacttcatcatagccaccacttacaggcggccgtcacggtacacactgtcgatgcagaatgctaa

SEQ ID NO: 297 - DNA, 2103 bp, Homo sapiens
ctcagactacaggtgtgagccaccatgcccggccttctcctttaagtattgttggcctcactttcccaactaaaatgggagctcactaagaacaaaggctgttccttcatcttatacttagtaccttgaaagggcctaccacacagtaggtggtcacgtgttagtctgttaggtcttttggattttctaggtagacaatcacatcgattgcaaataatagtctttctcttttcagtctttgtatttcttttttcttgttttattgcattgactgagctcatcagtgaaatgttgaatagtagcaatgatggagggcaccccaatcttattatgctcaatactcattaatttatgcaataggaatgtaaagtacctactgcaggtcaaatcctgtgcctggggataacagtgtaacacatttgagatcttttcctgtccactgaaatgcctgagcagtagcagtatttcagtaaacacgacaatgctgagaatatcaccaaattctccagacttgctgaagtgttcctttgggatcctggttcccaaaaagtatggacataggtccctgctggtggccccaggttccaggccatcagtaaggttgggggctgcagactggaccactgcaccgtggagcagaggtgaagaaaccaagacgcagagaggccaagccccttgccttgggtcacacagccaaaggaggcagagccagaactcacaaccagatccagaggcaacagggacatggccacctgggacgaaaaggcagtcacccgcagggccaaggtggctcccgctgagaggatgagcaagttcttaaggcacttcacggtcgtgggagacgactaccatgcctggaacatcaactacaagaaatgggagaatgaagaggaggaggaggaggaggagcagccaccacccacaccagtctcaggcgaggtcatcatcatctgcttggtggttctggatgccctcctggtgcttgctgagctcatcctggacctgaagatcatccagcccgacaagaataactatgctgccatggtattccactacatgagcatcaccatcttggtcttttttatgatggagatcatctttaaattatttgtcttccgcctggagttctttcaccacaagtttgagatcctggatgccgtcgtggtggtggtctcattcatcctcgacattgtcctcctgttccaggagcaccagtttgaggctctgggcctgctgattctgctccggctgtggcgggtggcccggatcatcaatgggattatcatctcagttaagacacgttcagaacggcaactcttaaggttaaaacagatgaatgtacaattggccgccaagattcaacaccttgagttcagctgctctgagaaggaacaagaaattgaaagacttaacaaactattgcgacagcatggacttcttggtgaagtgaactagacccggaccagctcccctcaaaaagaagacactgtctcatgggcctgtgctgtcacgagaggaacagctgcccctcctgggccgcttggtgagaggtttggtttgatacctctgcctccctcctgccagcatggattctgggtggacacagccttgtggaaggtccagtaccaccaagagctgcccatccactcccaccccacactgtatcaaatgtatcacattttctcatgttgaacactttagccttaattgaaaatgagcaacaaagctggacaattgctagttgtatataaaatttaatctcaccgaatgtacagttttcaaatttcacgtgtatattaaggaactgatgcatctgagcattctgaaagaaagaaaaagaagctactttagctgccaccccattctagaaaagtctcttattttcaagctgttctaaatagcttcgtctcagtttccccaaaaggggtacccaggcccctcctctgtgtgccccagctgcatcagccagcttctaggtggctccattgttttctgccacctgacaacatttttcctcaattactgtacaactactgtataaaataaaacaactactgtataaaataaactctctcttttccctggaaaaaaaaaaaaaaaaaa

SEQ ID NO: 298 - DNA, 1197 bp, Homo sapiens
atggatggtgtcactccaaccctttcgacaatcagagggaggaccttggagtccagcactctgcatgtgactccccgcagcctggacagaaataaagaccagatcaccaacatcttttccgggtttgcgggactcctcgccatcctcctggtcgttgcggttttctgcatcttgtggaattggaataaacggaagaagcgacaagttccttacctccgagttaccgtcatgcccttgctgactttgccacaaaccagacaaagagccaaaaatatttatgacatcttgccttggcgacaggaagacctggggagacatgagtcgaggagtatgcgcattttcagtactgagagcctcctctccagaaattctgagagcccggagcatgtgccctcccaagcaggcaatgccttccaggagcatacagcccacatccatgccacagagtacgcggtgggtatctatgacaacgccatggtcccccagatgtgtgggaacctcactccctcggcacactgcatcaatgtcagagcttccagagactgcgcaagcatttcttcagaggattcgcatgattatgtcaatgtccccacagcagaagagattgctgagactctagcttctaccaaaagcccttccagaaatctctttgttcttcccagtacccagaagctggagtttactgaggaaagagatgagggctgtggagatgctggtgactgcaccagtttgtattctccaggagctgaggacagtgattcactcagcaatggagaaggttcttctcagatctcaaatgactatgtcaacatgacagggttggatctcagtgccatccaggaaaggcagctctgggtggcttttcagtgctgcagagactatgaaaatgttccagcagcagatcccagtggaagccagcagcaggctgagaaagatgtgccatcctcaaacataggtcatgtcgaggacaagacagatgatcccgggacccatgtccaatgtgtcaaaaggacattccttgcttcaggggattatgcagactttcagccattcacacagagtgaggacagtcagatgaaacatagagaagagatgtcaaatgaggactccagtgactatgaaaatgtgctaactgccaagttaggaggcagggactctgagcaggggcctggcactcagctccttcctgatgaatga

SEQ ID NO: 299 - DNA, 1950 bp, Homo sapiens
atgagtagctttggagctggcaaaaccaaagaagttatcttcagtgtggaggatggctccgtgaaaatgttcctgaggggccgccctgtgcccatgatgatcccagacgagctggcacccacctacagcctggacacacgctcggagctgccttcttgccggctcaagctggagtgggtctatggctaccgtggccgagactgccgggccaacctttatttgctgcccaccggggagatagtgtactttgtggcctccgtagccgtgctatacagcgtggaggagcagaggcagcgacactacctgggacacaacgatgacatcaaatgcttggccatccacccagatatggtcaccatcgccacgggacaggtggcgggaaccactaaggaagggaagccgctgccgccccacgtgcgcatctgggactcagtttccctctccaccttacacgtgctgggcttgggggtgtttgacagagccgtgtgctgtgtgggcttctccaaatctaatggaggcaacctgctgtgtgcagtggatgaatccaatgatcacatgctctcggtgtgggactgggccaaggagaccaaggtggtggatgtcaagtgctccaatgaggctgtattggtggccaccttccaccccacggaccccactgtgcttatcacctgcgggaaatctcacatctacttctggaccttggaggggggcagcttgagcaagcggcaaggcctctttgagaaacatgagaaaccgaagtatgtgctgtgtgtgacctttttggaaggtggcgacgtggtcacgggggactctggggggaacctctatgtttggggcaaaggtgggaaccgtatcacacaggcggtgctgggcgcccacgacggcggcgtgtttgggctctgcgccctgcgggacgggacgctggtgtctggagggggccgtgatcggcgggtggtcctctggggttctgactacagcaagctgcaggaagtggaggtccctgaggactttggccctgtgcgcaccgtggcagagggccacggagacacactgtacgtggggaccacccgcaattccatcctgcagggctccgtgcacacaggcttctcactgctggtccagggccatgtggaagagctgtggggcctggccacacaccccagtcgggcccagtttgtgacctgcgggcaggataagctggtgcatctatggagctcagattcccaccagcccctgtggagcaggatcatcgaggaccctgcccgctcagccggcttccaccccagtggctctgtcctggctgtgggtacagtgactggcagatggctgctgctggacacggagacccatgacctggtggctatccacacagacggcaatgaacagatctcagtggtcagcttctccccagacggggcgtacctggccgtgggctcccacgacaacttggtgtacgtgtacacggtggaccagggcggccgcaaggtcagccgcctgggcaagtgctcgggccattccagttttatcacccacctggattgggcccaggacagcagctgctttgtcaccaactccggggactatgagattctgtactgggacccggctacctgtaagcagatcaccagtgcggatgctgtgaggaacatggaatgggccacagctacttgtgtcctagggtttggggtgtttgggatctggtctgagggggcggacggcactgatatcaacgctgtggcccgctctcatgatgggaagttgctggcttcagctgatgactttggcaaagttcacctgtttagctacccctgctgtcagcctcgagccctcagccacaagtacggtggacacagcagccatgtgacaaatgtggccttcttgtgggatgacagcatggccctgaccacagggggcaaggacaccagtgtgctacagtggcgggtggtctga

SEQ ID NO: 300 - DNA, 903 bp, Homo sapiens
atggagccaccgatggagccgtccggaggggagcaagagcccggagccgtcaggttcctggacctgccctgggaagacgtgctgctcccacacgtcctgaaccgggtcccgctgcgccagctgctccggctgcagcgcgttagccgggccttccggtcgctggtgcagcttcacctggccgggctgcgtcgcttcgatgccgcgcaggtgggtccgcagatcccgcgggccgcattggcccggctgctgcgggatgccgaggggctgcaggagctggcactggcgccgtgtcacgaatggctgtcagacgaggacctggtgccggtgctggcgcggaatccgcagctgcggagtgtggcgttgggcggctgcgggcaactgagtcgccgggcgcttggggctttggccgagggctgcccacgcctgcagcgcctgtcgctcgcgcactgtgactgggtggacgggctggcgctgcgcggcctcgctgatcgctgcccggccctggaggagctggatctcaccgcctgccgccagctcaaggacgaggccatcgtgtacctggcgcagaggcgcggcgctggtctccgcagcctctctctggccgtcaacgccaacgtgggggacgccgcggttcaagagttggctcggaactgcccagaactccaccaccttgacctcaccggctgcctccgcgtcggaagcgacggtgtcaggacattggccgagtactgccccgtgctgcgttcgctgcgggtgcggcactgccaccatgtggcggagtccagcctgagccgcttgcggaagcgcggcgtggacatcgacgtggagccgccgctgcaccaggccctggtgctgctgcaggatatggcgggcttcgcaccttttgtcaacctgcaggtctga

SEQ ID NO: 301 - DNA, 1101 bp, Homo sapiens
atggagaaagtgggcctggctccaggtggcatagaggcactggagaggcccccggggagcctggcgggatctggctggtcctgcgctctgcttccaggttctggccctgcaccctcgctgggctcccgctcactcctccacaccctggctctgtcaccagccccaagcaggtcccggccacaccatcggcgacattctcttctaagcgtatttcgtccccggttccgccgcaggtgccggctatgccatcggcgacttactcttctaagcgtattttgttcctggttccgccgcaggttccggccacgcgattggcaacgtgctcttctaagcgtattttgttcctggttccaccacaggtccccgccataccatcagcaacctgctcgtcttgtccgtgaggccttcccagctggctgggctcaccccatggctcctgcacctgtgcctgccctgggaaccttgggctgttaccgattcctcttcaaccctcggcaacatcttgggccttcttttccagccaggcggtatggcgcccctaggaggctgtgttttctccctcagaacacgggcaccccactgagggtcctgccttctgtgttctggagccccccctcaaggaagaaacccgtgctgtctgctcgcaactccaggatgtttggacacctcagccccgtgaggatccctcatctcagaggcaagtttaacctcagacttccttcattagatgagcaggtgatcccagccaggcttccgaagatggaggtgagggcagaagagcccaaagaagcaacggaggtcaaagaccaggtagagacccaggagcaggaagacaataaaaggggcccctgtagcaatggggaagcagcctccacctctaggcccctggagactcagggaaaccccacttccccccggtacaatcccaggcccttggagggaaatgtccagctcaagagcttgacagaaaacaaccagactgacaaggcccaggtacatgcagtgagtttctactccaagggccatggagtcgccagttcacacagccctgctggaggcttcccaaggggaaggacgcctccagcaaggcaacatggataa

SEQ ID NO: 302 - DNA, 2520 bp, Homo sapiens
atgatgtctgcctcgcgcctggctgggactctgatcccagccatggccttcctctcctgcgtgagaccagaaagctgggagccctgcgtggaggtggttcctaatattacttatcaatgcatggagctgaatttctacaaaatccccgacaacctccccttctcaaccaagaacctggacctgagctttaatcccctgaggcatttaggcagctatagcttcttcagtttcccagaactgcaggtgctggatttatccaggtgtgaaatccagacaattgaagatggggcatatcagagcctaagccacctctctaccttaatattgacaggaaaccccatccagagtttagccctgggagccttttctggactatcaagtttacagaagctggtggctgtggagacaaatctagcatctctagagaacttccccattggacatctcaaaactttgaaagaacttaatgtggctcacaatcttatccaatctttcaaattacctgagtatttttctaatctgaccaatctagagcacttggacctttccagcaacaagattcaaagtatttattgcacagacttgcgggttctacatcaaatgcccctactcaatctctctttagacctgtccctgaaccctatgaactttatccaaccaggtgcatttaaagaaattaggcttcataagctgactttaagaaataattttgatagtttaaatgtaatgaaaacttgtattcaaggtctggctggtttagaagtccatcgtttggttctgggagaatttagaaatgaaggaaacttggaaaagtttgacaaatctgctctagagggcctgtgcaatttgaccattgaagaattccgattagcatacttagactactacctcgatgatattattgacttatttaattgtttgacaaatgtttcttcattttccctggtgagtgtgactattgaaagggtaaaagacttttcttataatttcggatggcaacatttagaattagttaactgtaaatttggacagtttcccacattgaaactcaaatctctcaaaaggcttactttcacttccaacaaaggtgggaatgctttttcagaagttgatctaccaagccttgagtttctagatctcagtagaaatggcttgagtttcaaaggttgctgttctcaaagtgattttgggacaaccagcctaaagtatttagatctgagcttcaatggtgttattaccatgagttcaaacttcttgggcttagaacaactagaacatctggatttccagcattccaatttgaaacaaatgagtgagttttcagtattcctatcactcagaaacctcatttaccttgacatttctcatactcacaccagagttgctttcaatggcatcttcaatggcttgtccagtctcgaagtcttgaaaatggctggcaattctttccaggaaaacttccttccagatatcttcacagagctgagaaacttgaccttcctggacctctctcagtgtcaactggagcagttgtctccaacagcatttaactcactctccagtcttcaggtactaaatatgagccacaacaacttcttttcattggatacgtttccttataagtgtctgaactccctccaggttcttgattacagtctcaatcacataatgacttccaaaaaacaggaactacagcattttccaagtagtctagctttcttaaatcttactcagaatgactttgcttgtacttgtgaacaccagagtttcctgcaatggatcaaggaccagaggcagctcttggtggaagttgaacgaatggaatgtgcaacaccttcagataagcagggcatgcctgtgctgagtttgaatatcacctgtcagatgaataagaccatcattggtgtgtcggtcctcagtgtgcttgtagtatctgttgtagcagttctggtctataagttctattttcacctgatgcttcttgctggctgcataaagtatggtagaggtgaaaacatctatgatgcctttgttatctactcaagccaggatgaggactgggtaaggaatgagctagtaaagaatttagaagaaggggtgcctccatttcagctctgccttcactacagagactttattcccggtgtggccattgctgccaacatcatccatgaaggtttccataaaagccgaaaggtgattgttgtggtgtcccagcacttcatccagagccgctggtgtatctttgaatatgagattgctcagacctggcagtttctgagcagtcgtgctggtatcatcttcattgtcctgcagaaggtggagaagaccctgctcaggcagcaggtggagctgtaccgccttctcagcaggaacacttacctggagtgggaggacagtgtcctggggcggcacatcttctggagacgactcagaaaagccctgctggatggtaaatcatggaatccagaaggaacagtgggtacaggatgcaattggcaggaagcaacatctatctga

SEQ ID NO: 303 - DNA, 4739 bp, Homo sapiens
ggcagggccggaaggagtgcagcggctgccacggagctcgcagctgcggcttctgaggagtaagcggcgcggtagcgaaggccgccgaacctgcctggctagccggcgacttgagtgacgactcttttgaaacagatggtcaccatgtttagatattagcagtcccatatatgcatgtctgcatttgaaaatggaagagggaaacaacaatgaagaggtaattcacttgaacaactttcactgccatcggggacaagactttgtaattttcttctggaaaacccagattatccaaagagagaagacagaatcattataaatcccagtagcagtctgctggccagccaagatgagacaaagttgcctaaaatagacttttttgactattctaaattgacccctcttgaccagcgctgcttcatccaagctgctgacctcctcatggccgacttcaaagtgctcagtagtcaggacatcaagtgggccctgcacgagctcaaaggacactatgcaatcacccgaaaggccttgtctgatgccattaaaaaatggcaggagctgtcaccagaaaccagtggaaaaaggaagaagagaaaacaaatgaaccagtattcttacattgatttcaagtttgaacaaggtgacataaaaatagaaaagaggatgttctttcttgaaaataagcgacgacattgtaggtcctatgaccgacgtgctctccttccagctgtgcaacaagagcaggagttctatgagcagaaaatcaaagagatggcagagcatgaagactttttgcttgccctacagatgaatgaagaacagtatcaaaaggatggccagctgattgagtgtcgctgctgctatggggaatttccattcgaggagctgacgcagtgcgcagatgctcacttgttctgcaaagagtgtctcatcagatatgcccaagaggcagtctttggatctggaaagttggagctcagctgcatggaaggcagctgcacgtgttcgttcccaaccagtgagctggagaaggtgctcccccagaccatcctgtataagtactatgagcgaaaagccgaggaggaggttgcggcagcctacgccgacgagcttgtcaggtgcccgtcctgtagctttccggctctgttggacagtgatgtgaagaggttcagctgtcctaatcctcactgccgaaaggaaacctgtaggaagtgtcagggactctggaaagaacataatggcctcacctgtgaagagctggctgaaaaagacgacatcaagtaccgtacctctattgaagaaaaaatgactgctgcccgcattagaaaatgccacaagtgtgggactggcctcatcaaatctgaaggctgcaaccgcatgtcttgccgctgtggtgcccagatgtgctacctctgtcgagtttctattaatggatatgaccatttctgccaacatccccgctcaccaggagccccttgccaggagtgttcaagatgctctctctggaccgatcccactgaagatgatgagaagcttattgaggaaatccagaaggaggctgaagaggaacagaaaagaaagaatggagagaacaccttcaaacgcattggacccccgctggagaagcctgtggagaaggtgcagagggtggaggccctcccgaggcccgttccgcagaacctgccacagccacagatgccaccctatgccttcgcgcacccacccttccccctgcctcccgtgcggcctgtgttcaacaacttcccactcaacatggggcctatcccagccccgtacgtgccccctctgcccaacgtgcgggtcaactatgacttcggtcccatccacatgcccctggagcacaacctgcccatgcactttggcccccagccgcggcatcgcttctgatggccccgaatccccattgagcagcacaaagcccgtttggggtaggagtgtggatggagaaccctcccccaaggctggtgtctgtaccattgcatcctaagtcagcttgaagggtaggctggttttcttcccacccctttcctagaagggctactgctcctggaagagtggacggatccataataaagacgtcccaaatggtggagttcggagagagctgcgatgtgaactgcccctcccctcgcatcccccaggccaccaacggcagtccttctgccttgtccatggcataggccatagaccaggtccctgctgctcacacctgggcctctcctcggagccgacccctgggtagcaaggcagccgagagcatctccctggaggggcccacggttgggccaagggcagagggggctgcacctgcgggcctgggaagcattgctcagggtggggggctgggaccatggcccgcagaggcactgccacagctgtgagggccaagatgctgtccccccatccaaaacccgtgcgccactgcagtgagtgttgagggcacctctcctcccctcttacacctactcagatgaggcagcagcagacccatctcgcggcgggggttttgttctgttgccgcctaactttctcatcctcggtctctggaaagtcaggctgagaaatcctttcccaggccaggccgctgcggtacactggatggttctgaagctggcccattgaaagagcctcttaaggcagctgggacagaggcctggtggccctgctgggcagcccaactgctgggggagacgtttctgccaccctgggtgatgagcagcttttcccccctggctttctgggggaggagtgggcctccttagggagacaggtgaccctgggtgccacccctgccccgtgtgtgccccgggtgttctcagtggttgctgaaggcaggtagagggtgctgtccagtatcccccatgtgaaggtcacttcccttctcatggagtcagctgagcatcagctcagccctgccatgtccccactcaccctcctcgcctcctgtccggccctgggtttctagcggtgcctgaggcatcactctggcccattgacagatgagaggtctgaagccttcctggccacaggcatcactttctcctcctcctcatgccctgccttgtccttgtcgtgttgccatggggttctgagaggctgggagttcacagacctcagacacagctgagtccgacaaccattggggtggggctgcatcagtctccggagtggcccgccacctcctgaagcagggcctggcccacccaaggtgcctggggcaggcgggcaccgtcattcgctgccattggcttctcagatgtatttcaaggactaaagtgggctctaagatctaagatggcccggcgcggtggctcccgcctgtaatcccagcactttgggaggccgaggcgggcggatgagttgaggtcgggagtttgagtccccgtctctactaaaaatacaaaattagccggacaaggtggcgcatgcctataatcccaggtactcaggaggctgaggcaggagaatcacttgaacctgggaggcagaggttgcagtgagccaagattgtgccactgcactccagcctgagcaacaaaagcaaaactctatctttaaaaaaaaaaaaaaaaaaactaagatacccattctttctgcctttgcccaggatggaggctttgaagacaggtggtcacctggacctggggtaagggtgcgcagggaggccgggcttgggggcagcctgctgctatgtccttgctggcgcccatacctgttggactgcctgaactttgctactagcctgaacgacagtgccttggaaaggcaggctccatgcggcagcaacaggattgtcttcggtaccttaaatatgctccctgtgcttccccagggaggatctctgggagcagagggcggctgtagacatcacagctgaagaggtgacctcaggccctgggagcctcagctccctctgccctgtaccctaggcacgtggctccagcaagagccccaggcaggacaaagggagcaggcagcagctgcagaaacagccctagacaggtgctggcctcaaccctggcaggggagggggagcccagagtgatgtttctcctaaggccaaaccccaggggtgggtcatttgagaggagttccagctgttctggccacactgggctggtggggaaggagcggcggcctctttccttggagggtccctgattcctgaggatcctccccgagccaggcacgggggaccacagggctgccgtgagcacccaccctggttctccaggcccctctgtccagaggcagggcctgaacctcgggctcctgcctggaccagtgacagcattggggagagaagcactgggggtcttcagaccagccagcaaggggccgtgccagtgcccagagagcaggtcagacaacaggcaaccctgaggcagctggctccctctctctgccctgcagggcttgccgcagggcgtgaggctccccagccacagccccctcttacttgccttaaaactggagagaggaatctagtatttgcacttagcaaaatatttaaaaactgaaaaaaatgtgcatgatctgtcactttgtataaaaacaagaaacgattagttcattaaactttttctttaccttctggtagtaaaaatagataaaataattccgtttcaactactgtgtgtaaaaagcctgtatcatatgtaactgggacttttgtaaataaatgtttgtgcgctctgctcaaaaaaaaaaaaaaaaaa

SEQ ID NO: 304 - DNA, 1083 bp, Homo sapiens
atgggcctgttgctcctggtcccgttgctcctgctgcccggctcctacggactgcccttctacaacggcttctactactccaacagcgccaacgaccagaacctaggcaacggtcatggcaaagacctccttaatggagtgaagctggtggtggagacacccgaggagaccctgttcacctaccaaggggccagtgtgatcctgccctgccgctaccgctacgagccggccctggtctccccgcggcgtgtgcgtgtcaaatggtggaagctgtcggagaacggggccccagagaaggacgtgctggtggccatcgggctgaggcaccgctcctttggggactaccaaggccgcgtgcacctgcggcaggacaaagagcatgacgtctcgctggagatccaggatctgcggctggaggactatgggcgttaccgctgtgaggtcattgacgggctggaggatgaaagcggtctggtggagctggagctgcggggtgtggtctttccttaccagtcccccaacgggcgctaccagttcaacttccacgagggccagcaggtctgtgcagagcaggctgcggtggtggcctcctttgagcagctcttccgggcctgggaggagggcctggactggtgcaacgcgggctggctgcaggatgccacggtgcagtaccccatcatgttgccccggcagccctgcggtggcccgggcctggcacctggcgtgcgaagctacggcccccgccaccgccgcctgcaccgctatgatgtattctgcttcgctactgccctcaaggggcgggtgtactacctggagcaccctgagaagctgacgctgacagaggcaagggaggcctgccaggaagatgatgccacgatcgccaaggtgggacagctctttgccgcctggaagttccatggcctggaccgctgcgacgctggctggctggcagatggtagcgtccgctaccctgtggttcacccgcatcctaactgtgggcccccagagcctggggtccgaagctttggcttccccgacccgcagagccgcttgtacggtgtttactgctaccgccagcactag

SEQ ID NO: 305 - DNA, 2904 bp, Homo sapiens
atgcccagcccgccggggctccgggcgctatggctttgcgccgcgctgtgcgcttcccggagggccggcggcgccccccagcccggcccggggcccaccgcctgcccggccccctgccactgccaggaggacggcatcatgctgtctgccgactgctctgagctcgggctgtccgccgttccgggggacctggaccccctgacggcttacctggacctcagcatgaacaacctcacagagcttcagcctggcctcttccaccacctgcgcttcttggaggagctgcgtctctctgggaaccatctctcacacatcccaggacaagcattctctggtctctacagcctgaaaatcctgatgctgcagaacaatcagctgggaggaatccccgcagaggcgctgtgggagctgccgagcctgcagtcgctgcgcctagatgccaacctcatctccctggtcccggagaggagctttgaggggctgtcctccctccgccacctctggctggacgacaatgcactcacggagatccctgtcagggccctcaacaacctccctgccctgcaggccatgaccctggccctcaaccgcatcagccacatccccgactacgcgttccagaatctcaccagccttgtggtgctgcatttgcataacaaccgcatccagcatctggggacccacagcttcgaggggctgcacaatctggagacactagacctgaattataacaagctgcaggagttccctgtggccatccggaccctgggcagactgcaggaactggggttccataacaacaacatcaaggccatcccagaaaaggccttcatggggaaccctctgctacagacgatacacttttatgataacccaatccagtttgtgggaagatcggcattccagtacctgcctaaactccacacactatctctgaatggtgccatggacatccaggagtttccagatctcaaaggcaccaccagcctggagatcctgaccctgacccgcgcaggcatccggctgctcccatcggggatgtgccaacagctgcccaggctccgagtcctggaactgtctcacaatcaaattgaggagctgcccagcctgcacaggtgtcagaaattggaggaaatcggcctccaacacaaccgcatctgggaaattggagctgacaccttcagccagctgagctccctgcaagccctggatcttagctggaacgccatccggtccatccaccccgaggccttctccaccctgcactccctggtcaagctggacctgacagacaaccagctgaccacactgcccctggctggacttgggggcttgatgcatctgaagctcaaagggaaccttgctctctcccaggccttctccaaggacagtttcccaaaactgaggatcctggaggtgccttatgcctaccagtgctgtccctatgggatgtgtgccagcttcttcaaggcctctgggcagtgggaggctgaagaccttcaccttgatgatgaggagtcttcaaaaaggcccctgggcctccttgccagacaagcagagaaccactatgaccaggacctggatgagctccagctggagatggaggactcaaagccacaccccagtgtccagtgtagccctactccaggccccttcaagccctgtgagtacctctttgaaagctggggcatccgcctggccgtgtgggccatcgtgttgctctccgtgctctgcaatggactggtgctgctgaccgtgttcgctggcgggcctgtccccctgcccccggtcaagtttgtggtaggtgcgattgcaggcgccaacaccttgactggcatttcctgtggccttctagcctcagtcgatgccctgacctttggtcagttctctgagtacggagcccgctgggagacggggctaggctgccgggccactggcttcctggcagtacttgggtcggaggcatcggtgctgctgctcactctggccgcagtgcagtgcagcgtctccgtctcctgtgtccgggcctatgggaagtccccctccctgggcagcgttcgagcaggggtcctaggctgcctggcactggcagggctggccgccgcgctgcccctggcctcagtgggagaatacggggcctccccactctgcctgccctacgcgccacctgagggtcagccagcagccctgggcttcaccgtggccctggtgatgatgaactccttctgtttcctggtcgtggccggtgcctacatcaaactgtactgtgacctgccgcggggcgactttgaggccgtgtgggactgcgccatggtgaggcacgtggcctggctcatcttcgcagacgggctcctctactgtcccgtggccttcctcagctttgcctccatgctgggcctcttccctgtcacgcccgaggccgtcaagtctgtcctgctggtggtgctgcccctgcctgcctgcctcaacccactgctgtacctgctcttcaacccccacttccgggatgaccttcggcggcttcggccccgcgcaggggactcagggcccctagcctatgctgcggccggggagctggagaagagctcctgtgattctacccaggccctggtagccttctctgatgtggatctcattctggaagcttctgaagctgggcggccccctgggctggagacctatggcttcccctcagtgaccctcatctcctgtcagcagccaggggcccccaggctggagggcagccattgtgtagagccagaggggaaccactttgggaacccccaaccctccatggatggagaactgctgctgagggcagagggatctacgccagcaggtggaggcttgtcagggggtggcggctttcagccctctggcttggcctttgcttcacacgtgtaa

SEQ ID NO: 306 - DNA, 519 bp, Homo sapiens
atggcgggatcagtggccgacagcgatgccgtggtgaaactagatgatggccatttaaacaactctttgagctctccagttcaagcggacgtgtacttcccacgactgatagttccattttgtgggcacattaaaggtggcatgagaccaggcaagaaggtgttagtgatgggcatcgtagacctcaacccagagagctttgcaatcagcttgacctgtggggactcagaagaccctcctgccgatgtggcaatcgaactcaaagctgtgttcacagatcggcagctactcagaaattcttgtatatctggggagaggggtgaagaacagtcagcaatcccttactttccattcattccagaccagccattcagggtggaaattctttgtgagcacccacgtttccgagtgtttgtggatggacaccaactttttgatttttaccatcgcattcaaacgttatctgcaattgacaccataaagataaatggagacctccagatcaccaagcttggctga

SEQ ID NO: 307 - DNA, 2010 bp, Homo sapiens
atgaagatattcgtgggcaacgtcgacggggcggatacgactccggaggagctggcagccctctttgcgccctacggcacggtcatgagctgcgccgtcatgaaacagttcgccttcgtgcacatgcgcgagaacgcgggcgcgctgcgcgccatcgaagccctgcacggccacgagctgcggccggggcgcgcgctcgtggtggagatgtcgcgcccaaggcctcttaatacttggaagattttcgtgggcaatgtgtcggctgcatgcacgagccaggaactgcgcagcctcttcgagcgccgcggacgcgtcatcgagtgtgacgtggtgaaagactacgcgtttgttcacatggagaaggaagcagatgccaaagccgcaatcgcgcagctcaacggcaaagaagtgaagggcaagcgcatcaacgtggaactctccaccaagggtcagaagaaggggcctggcctggctgtccagtctggggacaagaccaagaaaccaggggctggggatacggccttccctggaactggtggcttctctgccaccttcgactaccagcaggcttttggcaacagcactggtggctttgatgggcaagcccgtcagcccacaccacccttctttggtcgcgaccgcagccctctgcgccgttcacctccccgagcctcttatgtggctcctctgacggcccagccagctacctaccgggcccagccgtccgtgtcactgggagctgcctacagggcccagccttctgcctctttgggtgttggctatcggactcagcccatgacagcccaggcagcctcttaccgcgctcagccctctgtctcccttggggcaccatacaggggccagctggctagtcctagctcccagtctgctgcagcttcttcactcggcccatatggtggagcccagccctcagcctcggccctttcctcctatgggggtcaggcagctgcagcttcttcgctcaactcctatggggctcagggttcctcccttgcctcctatggtaaccagccatcctcttacggcgcccaggctgcctcttcctatggggttcgtgcagctgcttcttcctacaacacccagggagcagcttcctccttaggctcctacggggctcaggcagcctcctatggggcccagtctgcagcctcctcactagcttatggagcccaggcagcttcatataatgcccagccctcggcctcttacaatgcccagtctgccccatatgctgcacagcaggctgcttcctactcttcccaacctgctgcctatgtggcacagccagccacagctgctgcctatgccagccagccagcagcctacgccgcacaagccactaccccaatggctggctcctatggggcccagccggttgtgcagacccagctgaatagttacggggcccaagcatcaatgggcctttcaggctcctatggggctcagtcggctgctgcggccactggctcctatggtgccgcagcagcctacggggcccaaccttctgccaccctggcagctccttaccgcactcagtcatcagcctcattggctgcttcctatgctgcccagcagcatccccaggctgctgcctcctaccgcggccagccaggcaatgcctacgatggggcaggtcagccgtctgcagcctacctgtccatgtcccagggggccgttgccaacgccaacagcaccccgccgccctatgagcgtacccgcctctccccaccccgggccagctacgacgatccctacaaaaaggctgtcgccatgtcgaaaaggtatggttccgaccggcgtttagccgagctctctgattaccgccgtttatcagagtcgcagctttcgttccgccgctcgccgacaaagtcctcgctggattaccgtcgcctgcccgatgcccattccgattacgcacgctattcgggctcctataatgattacctgcgggcggctcagatgcactctggctaccagcgccgcatgtag

SEQ ID NO: 308 - DNA, 668 bp, Homo sapiens
atgcaattggagaaactggttgttttaccaggcgttgattggaaatgtgtgcttccctttaagcagtcaagctcaacttgcagaactgatgggaaccccttgggaaaactggcctcaaatgtttgtctacacagtccacatacagggttcttaacctgcgatgagggaaacttcccagggcttgtctgggtatgcccacagtggactggagcccaaaatgcacactggaggaagtggatggagccacgtggatgtcatgccttatgcaggggaggagcctgctctcttcagctcctgtggtaatgtgggaatcgatctgtgaggtgaggacctgttagcaggaacccctcttgctttgctgaaagttttatttttctttttgccctataaaaccctgttctactaacccttcaatatgtctgcattcctaaattttcctggtcatgtgacgagaacctaggttttagctgaactaaggagcaaaattctgcaacataaagtcaaagaaaactatgcctatatccattaaatcaaatgttaaaaagcaaatataaagaaaaagtcttcacagccctagagaaaagtgaaacattgtacataaagaagtaataatttgaatggattgtcagaaaccatgactagaagacagaggagcaatattttcaaat

SEQ ID NO: 309 - DNA, 660 bp, Homo sapiens
atgaattcatctaaatcatctgaaacacaatgcacagagagaggatgcttctcttcccaaatgttcttatggactgttgctgggatccccatcctatttctcagtgcctgtttcatcaccagatgtgttgtgacatttcgcatctttcaaacctgtgatgagaaaaagtttcagctacctgagaatttcacagagctctcctgctacaattatggatcaggttcagtcaagaattgttgtccattgaactgggaatattttcaatccagctgctacttcttttctactgacaccatttcctgggcgttaagtttaaagaactgctcagccatgggggctcacctggtggttatcaactcacaggaggagcaggaattcctttcctacaagaaacctaaaatgagagagttttttattggactgtcagaccaggttgtcgagggtcagtggcaatgggtggacggcacacctttgacaaagtctctgagcttctgggatgtaggggagcccaacaacatagctaccctggaggactgtgccaccatgagagactcttcaaacccaaggcaaaattggaatgatgtaacctgtttcctcaattattttcggatttgtgaaatggtaggaataaatcctttgaacaaaggaaaatctctttaa

SEQ ID NO: 310 - DNA, 729 bp, Homo sapiens
atggtgtctggacggttctacttgtcctgcctgctgctggggtccctgggctctatgtgcatcctcttcactatctactggatgcagtactggcgtggtggctttgcctggaatggcagcatctacatgttcaactggcacccagtgcttatggttgctggcatggtggtattctatggaggtgcgtcactggtgtaccgcctgccccagtcgtgggtggggcccaaactgccctggaaactcctccatgcagcgctgcacctgatggccttcgtcctcactgttgtggggctggttgctgtctttacgtttcacaaccatggaaggactgccaacctctactcccttcacagctggctgggcatcaccactgtcttcctcttcgcctgccagtggttcctgggctttgctgtcttcctcctgccctgggcgtccatgtggctgcgcagcctcctaaaacctatccacgtcttttttggagccgccatcctctctctgtccatcgcatccgtcatttcgggcattaatgagaagcttttcttcagtttgaaaaacaccaccaggccataccacagcctgcccagtgaggcggtctttgccaacagcaccgggatgctggtggtggcctttgggctgctggtgctctacatccttctggcttcatcttggaagcgcccagagccggggatcctgaccgacagacagcccctgctgcatgatggggagtga

SEQ ID NO: 311 - DNA, 240 bp, Homo sapiens
atggtgtggcaggagaaggaggacatgcacaagcaattggttgaagcttcagagacattgaaatcccaagccaaagaactgaaagatgcccatcagcagcaaaagctggccctgcaggagttcttggagctcaatgagctcatggcagagctctactcccagaagcagaaggtgtgggacaaggaggaggagatggaagtagccatgcagaaagctgacatgatgtggcaggagatctga

SEQ ID NO: 312 - DNA, 1681 bp, Homo sapiens
gcctcagaaaggcagaaaccaggaaagctaagacaaacaaaactacaatggaagaagaaaacgtcctcaactagacatctgccaaaaatgaacatgagcagctgacctactcttccacaaggtccaaagcccccagtgtcatcatcacaggtcttaagccagccaccaaatatgtatttcacatccgagtgagaactgcgacaggatacagtggctacagtcagaaatttgaatttgaaacaggagatgaaagactctccatttcaagtgacaaaactgtactggcttaatgaaaagtgggactttattgcctcagcttctgacatggcagcagaacaaggacagattctcgtgatagccaccgccgctgttggcggattcactctcctcgtcatcctcactttattcttcttgatcactgggagatgtcagtggtacataaaagccaagatgaagtcagaagagaagagaagaaaccacttacagaatgggcatttgcgcttcccgggaattaaaacttacattgatccagatacatatgaagacccatccctagcagtccatgaatttgcaaaggagattgatccctcaagaattcgtattgagagagtcattggggcaggtgaatttggagaagtctgtagtgggcgtttgaagacaccagggaaaagagagatcccagttgccattaaaactttgaaaggtggccacatggatcggcaaagaagagattttctaagagaagctagtatcatgggccagtttgaccatccaaacatcattcgcctagaaggggttgtcaccaaaagatccttcccggccattggggtggaggcgttttgccccagcttcctgagggcagggtttttaaatagcatccaggccccgcatccagtgccagggggaggatctttgccccccaggattcctgctggcagaccagtaatgattgtggtggaatatatggagaatggatccctagactcctttttgcggaagcatgatggccacttcacagtcatccagttggtcggaatgctccgaggcattgcatcaggcatgaagtatctttctgatatgggttatgttcatcgagacctagcggctcggaatatactggtcaatagcaacttagtatgcaaagtttctgattttggtctctccagagtgctggaagatgatccagaagctgcttatacaacaactagacccacaaatcacaacaaagagcaatcagaactggttaaagaagatggtctggaaagcttgtgtgagcagtgcgagtccagctctggttatggtactggactggtcctcatgtggaagagaaacagaagggccatgggagccagtggccagaccagaaagcaatgtgacaagagagataaccctccaacagacctcttccaaactctaacacttaacctctgctattctgcataaattctgagaaaagccaaattttctgtcggtctaagaagacatagcctacacccaacatggagataattataaaaaataatgaagcagcatgaggggaaggtatttaatgtgtattttaaagttgggagagattctccttcacctaatttaggtgtttgtgaattggcttgactttttgaagttaatttttaagccttgaacatgtccaactttaagaactttaagaataaatatttta

SEQ ID NO: 313 - DNA, 4155 bp, Homo sapiens
atgatgcatctccggctcttctgcatcctgctcgccgcggtctcaggagccgagggctggggctactacggctgcgacgaggagctggtgggtcccctgtatgcacgctccctgggcgcctcctcctactacagtctccttactgcgccgagattcgccaggctgcacggcataagcgggtggtcaccacggattggggatccgaatccctggctccagatagacttaatgaagaagcaccggatccgggccgtggccacacagggctcctttaattcttgggactgggtcacacgttacatgctactctacggcgaccgagtggacagctggacaccgttctaccagcgagggcacaactcgaccttctttggtaacgtgaacgagtcggcggtggtgcgccatgacctgcacttccacttcactgcgcgctacatccgcatcgtgcccctggcctggaacccacgcggcaagatcggcctgaggctcggcctctatggctgcccatacaaggccgacatactctatttcgacggcgacgatgccatctcctaccgcttcccgcgaggggtcagccgaagcctgtgggacgtgttcgccttcagcttcaagaccgaggagaaggacggtcttctgctgcacgccgagggcgcccagggcgactacgtgacgctcgagctggagggggcacacctgctgctgcacatgagcctgggcagcagccctatccagccaagaccaggtcacaccaccgtgagcgcaggcggagtcctcaatgaccagcactggcactatgtgcgggtggaccgatttggccgcgatgtaaatttcaccctggacggctatgtgcagcgctttattctcaatggagacttcgagaggctgaacctggacactgagatgttcatcggaggtctggtgggcgccgcgcggaagaacctggcctatcggcataacttccgcggctgcatagaaaacgtaatcttcaaccgcgtcaacatcgcagacctggccgtgcggcgccattcccggatcaccttcgagggtaaggtggcttttcgttgcctggacccggtaccgcaccctatcaacttcggaggccctcacaacttcgttcaagtgcccggtttcccacgccgtggccgcctggcagtctcatttcgcttccgcacctgggacctcaccgggcttctccttttctcccgtctgggggacgggctgggccacgtggagctgacgctcagcgaagggcaggtcaacgtgtccatcgcgcagagcggccgaaagaagcttcagttcgctgctgggtaccgactgaatgacggcttttggcacgaggtgaattttgtggcacaggaaaaccatgcagttatcagcattgatgatgtggaaggggcagaggtcagggtctcatacccgttgctgatccggacagggacctcatatttctttgggggttgtcccaagccagccagtcgatgggactgccactccaaccagacggcattccatggctgcatggagctgctcaaggtggatggtcaactggtcaacctgactctggtggagggccggcggcttggattctatgctgaggtcctctttgatacatgtggcatcactgataggtgcagccctaacatgtgtgagcatgatggacgctgctaccagtcttgggatgacttcatttgctactgcgaactgacgggctacaagggagagacctgccacacacctttgtataaggaatcctgtgaggcttatcggctcagtgggaaaacttctggaaacttcaccattgatcctgatggcagtggccccctgaagccatttgtagtgtactgtgatatccgagagaaccgagcgtggacagttgtgcggcatgacaggctgtggacaactcgagtgacaggttccagcatggagcggccattcctgggggctatccagtactggaatgcatcctgggaggaagtcagtgcccttgccaatgcttcccagcattgtgaacagtggatcgagttctcctgctacaattcccggctgctcaacactgcaggaggctacccctacagcttttggattggccgaaatgaggagcagcacttctactggggaggctcccagcctgggatccagcgctgtgcctgtggtctggaccggagctgtgtggaccctgccttgtactgcaactgtgacgctgaccagccccagtggagaactgacaagggactgctgacctttgtggaccatctgcctgtcactcaggtagtgataggggatacgaaccgctccacttctgaggcccagttcttcctgaggcctctgcgctgctatggcgatcgaaattcctggaacaccatttccttccacaccggggctgcactacgcttccccccaatccgtgccaaccacagcctggatgtctccttctacttcaggacctctgctccctcgggggtcttcctagagaatatggggggcccttactgccagtggcgccgaccttatgtgcgggtggaactcaacacatcccgggatgtggtcttcgcctttgatgtggggaatggggatgagaacctcacagtacactcagacgactttgagttcaatgatgacgagtggcacctggtccgggctgaaatcaacgtgaagcaggcccggctccgagtggatcaccggccctgggttctgcggcctatgccactgcagacctacatctggatggagtatgaccagcccctctatgtgggatctgcagagcttaagagacgcccctttgtgggttgcttgagggccatgcgtctgaacggagtgactctgaacctggagggccgtgccaatgcctctgagggtacctcacccaactgcacaggccactgtgcccaccctcggctcccctgtttccatggaggccgctgcgtggagcgctatagctactacacgtgtgactgtgacctcacggcttttgatgggccatactgcaaccacgatattggtggtttctttgagccgggcacctggatgcgctataacctacagtcagcgctgcgctctgcagccagggagttctcccacatgctgagccggccagtgccaggctatgagcctggctacatcccgggctatgatactccgggctatgtgcctggctaccatggccccgggtaccgcctgcccgactacccccggcctggtcggcctgtgcccggttaccgtgggcctgtctacaacgttacgggagaggaggtctccttcagcttcagcaccagctccgcccctgctgtcctgctctacgtcagttcctttgttcgtgactacatggctgtgctcatcaaggatgatgggacccttcagctgcgatatcagctgggcaccagtccctacgtgtaccagctaaccactcgaccagtgaccgatggccagccccatagcatcaatatcacccgtgtttaccggaacctcttcatccaggtggactacttcccactgacagagcagaagttctcgctgttggtggacagccagttggactcacccaaggccttgtatttagggcgtgtgatggagacaggagtcattgacccggagatccagcgctacaacaccccaggtttctcaggctgcctgtctggtgttcgattcaacaacgtggctcccctcaagacccacttccgaacccctcgacccatgactgctgagctagctgaggcccttcgagttcagggagaactgtccgaatctaattgcggagctatgccacgtcttgtttcagaggtgccacctgagcttgatccctggtatctgcccccagacttcccctactaccatgatgaaggatgggttgccatacttttaggctttttggtggcctttctgctgctggggctggtgggaatgttggtgctcttctatctgcaaaatcatcgctataagggctcctaccataccaatgagcccaaggctgcccacgagtaccatcctggcagcaaacctcccctacccacttcaggccctgcccaggtccccacccctacagcagctcccaaccaagctccagcctcagccccagccccagccccaactccagccccagcccctggcccccgggatcagaacctaccccagatcctggaggagtccaggtctgaatga

SEQ ID NO: 314 - DNA, 1356 bp, Homo sapiens
atgcacggttactttggctgcaatgctgctgcagagcccggttactctgccttcgtgggaactccacagatatgtgtcacaaagatgtctacacggaactgccagggaatggactcagtgatcaaacccctggacacaattcctgaggataaaaaagtcagagttcagaggacacagagcacttttgacccatttgagaaaccagctaatcaagtaaagagggtgcattctgagaacaatgcttgcattaactttaagacctcctccactggcaaagagtcacctaaagttaggcggcactccagccccagctcgccaacaagtcccaaatttggaaaagctgactcatatgaaaagctggaaaaactaggggaaggatcttatgctacagtatacaaagggaaaagcaaggtaaatgggaagttggtagctctgaaggtgatcaggctgcaggaagaagaagggacacctttcacagctatcagggaagcttctcttttaaaaggactaaaacatgctaacatagtgctacttcatgacatcatccataccaaggagacgctgacacttgtgtttgaatatgtgcacactgatttatgtcagtacatggacaagcaccctggggggctgcatccagataatgtgaagttgtttttatttcagttgctgcgaggtctgtcttacatccaccagcgttatattttgcacagagacctgaaaccacagaaccttctgatcagtgacacgggggagttaaagctggcagatttcggtcttgcaagagcaaaatccgtccctagccacacatactccaacgaagtggttaccttgtggtacagacctccagatgtccttctaggctcaacagaatattccacctgccttgacatgtggggagtaggttgcatctttgttgaaatgatccaaggagttgctgcttttccaggaatgaaagacattcaggatcaacttgaacgaatatttctggttcttggaacaccaaatgaggacacatggcctggagttcattctttaccacattttaagccagaacgctttaccctgtacagctctaaaaaccttagacaagcatggaataagctcagctatgtgaaccatgcagaggacctggcctccaagctcctacaatgttccccaaagaacagactgtcggcacaggctgccttgagccacgagtattttagtgacctgccgccacggctatgggaactcaccgacatgtcttctatttttactgtcccaaatgtgagattgcaaccagaagctggagaaagcatgcgggcctttgggaaaaacaatagttatggcaaaagtctatcaaacagcaagcactga

SEQ ID NO: 315 - DNA, 2747 bp, Homo sapiens
gaagtgggttccggtggtggcagaggtgcttgtgtttttgtcggtacaggagagtcgctatggcggcggtggattcggatgtcgaatcgctgccgcgtggggggttccgctgctgcctctgccacgttactacagccaaccgacccagccttgatgcccacttgggaggcagaaagcaccggcacctggtagaactacgagctgcgagaaaggcccagggacttcgaagtgtgtttgtcagtggctttcccaggggtgtggattctgctcagctctctgagtacttcctagcatttgggcctgtggccagtgttgtcatggacaaggacaagggagtgtttgccattgtggagatgggggacgtgggtgctcgagaggctgtcttgtcacagtcccagcacagcctgggaggacatcgcctgcgtgtccgcccacgggagcagaaggagttccagagcccggcctccaaatcccccaaaggagcggcccccgacagtcaccagctggccaaagcgctagctgaggctgcagacgtgggggcacaaatgataaagcttgtggggctgagggagttgtccgaggccgagcggcagcttcgcagcctagtggtggccctgatgcaggaggtcttcacagagttcttccctggctgtgtggtccacccttttggctcttccataaatagcttcgatgtccatggctgtgatcttgacctcttcttggatctgggtgacttggaagagccccagccagtcccaaaggctccagaatctccatcgctggactcggccctggcttccccactggaccctcaagccctggcctgcaccccagcttcccctccagattcacaacctcctgcttctccccaggattctgaagccctggactttgaaaccccttcctcctccctggcgccccaaactccggactctgccttggcctccgagacccttgcttctccccagtctctgcctccagcttcaccactgctagaggacagggaagagggggacctggggaaggcctcggaactagcagagaccccaaaggaggagaaagcagagggggcagcaatgctggagctggtgggatccattctccggggctgtgtccctggggtgtatcgagtccaaactgtgccctctgcccggcgccctgtggtcaagttctgtcatcggccttcaggtctccacggtgatgtctccctcagtaaccggctggccctgcataactcccgtttcctgagtctctgctctgagctggatggtcgagtccggcccctcgtgtacaccctccgctgctgggctcagggtcgggggctgtcagggagtggcccccttctcagtaactacgccctgaccttgctggtgatctattttcttcagaccagggaccctcctgtgttgcccactgtgtcccagctcacccagaaagcaggagagggggaacaggtggaagtcgatggctgggactgcagtttccccagggatgcctcaagactggagcccagcataaatgtggagcccctcagttccctgctagcccagttcttctcctgtgtatcttgttgggatcttcgtggctccctgctgtccctgcgggagggtcaggcactgcctgtggcagggggcctgccttctaatctctgggagggtctgcgccttggccccctgaatctccaggacccttttgacctgagtcacaatgtcgcagccaatgtgaccagccgggtggctgggcgcctacagaactgctgccgagcagcagccaattactgccgaagcctccagtaccagcgccgttcctcccggggtcgggactgggggctgctccctcttctgcagcccagctcccccagctccctgctctctgctacgccgatccctttaccccttgcacccttcacccagctcactgctgccctggtgcaggtattcagggaagcactggggtgccatatagaacaggcaaccaagagaacgcggtcagaaggaggtggaactggggagtcctctcagggagggacaagcaaaagactcaaagtagatggacagaaaaactgctgtgaggaggggaaagaggagcagcagggatgtgcaggggacggtggggaagacagggtagaagagatggttatagaggttggagagatggtgcaggactgggccatgcagagccctgggcagccaggggacctgcccctgaccactggaaagcatggagcccctggagaagaggggcagcccagccacgcagccctggcagagcgggggcccaagggacatgaggcagcccaagaatggtctcagggtgaggcagggaagggggcatccctgccctcctcagcgagctggcgctgtgccttgtggcaccgagtgtggcaagggcggcggcgagcccgtagacgcttgcagcagcaaaccaaggagggagctggaggtggcgctggcacaagagcagggtggctggcgactgaggctcaggtcacccaggagctgaaaggactgagtggtggcgaagagaggccagaaactgagcccctgctgagctttgtggcgtctgtctccccggctgaccgaatgctcactgtgaccccgctccaggatccccaaggcctgttccctgatctccatcatttcttacaggttttcctccctcaagcaattcgacatctcaagtgaagacatggcccctgaagggcaataaagctgctagtttattaatacaaaaaaaaaaaaaaaaaa

SEQ ID NO: 316 - DNA, 1842 bp, Homo sapiens
atggcggcgaccgcggtggcggcggctgtggcgggaaccgagtcggcccagggtcccccgggcccggcagcgtcgctggagctgtggctcaacaaagccacagacccaagcatgtcggaacaggattggtcagctatccagaatttctgtgagcaggtgaacactgaccccaatggccccacacatgcgccctggctactggcccacaagatccagtctccgcaagagaaggaagctctttatgccttaacggtgctggagatgtgcatgaaccactgtggggagaagttccacagcgaggtggccaaatttcgtttcctgaacgaactgatcaaagtgttgtccccaaagtacctggggtcctgggccacaggaaaagttaaaggaagagtcattgaaatactcttcagttggacagtctggtttccggaagacatcaagattcgagacgcttatcagatgctgaagaaacaaggaattataaaacaagaccctaaactaccagtggataaaatcttacccccaccatctccctggcccaagagctccatctttgatgctgatgaagaaaagtccaagcttctgacaaggcttctaaagagcaaccaccccgaggaccttcaggctgcaaaccggttaatcaagaatttggtcaaggaggaacaagaaaaatcggagaaggtgtccaagagggtcagtgcggtggaggaagtgcgaagccatgtgaaggtgctgcaggagatgctgagcatgtaccgcaggccagggcaggccccgcccgaccaggaggccctgcaggtcgtgtatgagaggtgtgaaaagctgcggcccacgctgttccggttggcgagtgacaccactgatgacgatgatgcactcgcggaaattctccaggcaaatgacctcctcacccaaggagttctgctgtacaaacaggtgatggagggccgggtcacctttggaaacagagtgaccagctcattgggagacatccctgtctccagagtctttcagaatccagcaggctgcatgaagacctgccccctgattgacttggaggtggacaatggacctgcgcagatggggactgtggtgccatctttgcttcatcaggacctggcagccttgggaatcagtgatgctcctgttacaggcatggtttctggtcagaattgctgtgaggaaaagaggaatccctcctccagcacgctgccaggcggtggtgttcagaacccttctgcagacaggaatttgctggacctcctctcagcacagccagctccgtgccctctgaattatgtttcgcagaaaagtgtccccaaggaagtgccaccaggtactaagtcctctccaggttggtcctgggaggctggcccgttggctccttccccatcttcacagaatacacctctggctcaagtgtttgtccctttggagtctgttaagcccagcagcctgccgcctctcattgtgtatgaccggaatggattcagaattctgctccacttctcccagacgggagcccctgggcacccagaggtacaggtgctgctcttgaccatgatgagcacggctccccagcctgtctgggatatcatgtttcaagtggctgtgccaaagtcaatgagagtgaagctgcagccggcatccagctccaagcttcctgcattcagtcctttgatgcctccagctgtgatatctcagatgctgctgcttgacaatccacacaaagaacctatccgcttacggtacaagctgacattcaaccaaggtggacagcctttcagcgaagtaggagaagtgaaagacttcccagacctggctgtcttgggcgcagcctaa

SEQ ID NO: 317 - DNA, 1610 bp, Homo sapiens
atgggacatgagagcatttggaaagagataaaaaggcttaccttgaggacagccttattaggagcagaggcaaacacaggtttttgggcgtttagcctgcgacggcagcccgagaggaagagttgggcagagttgcaggggtctccacagctgaggcagtttggccggattatttgggttcctgctcggatggcggcgacgctgatcctggagcccgcgggccgctgctgctgggacgaaccggtgcgaatcgccgtgcgcggcctagccccggagcagccggtcacgctgcgcgcgtccctgcgcgacgagaagggcgcgcttttccaggcccacgcgcgctaccgcgccgacacccttggcgagctggacctggagcgcgcgcccgcgctgggcggcagcttcgcggggcttgagcccatggggctgctctgggccttggagcccgagaaacccttggtgcggctggtgaagcgcgacgtgcgaacgcccttggccgtggagctggaggtgctggatggccacgaccccgaccccgggcggctgctgtgccgggtgcggcacgagcgctacttcctcccgcccggggtgcggcgcgagccggtgcgcgcgggccgggtgcgaggcacgctcttcctgccgccagaacctgggccctttcctggcattgtggacatgttcggaactggaggtggcctgctggagtatcgggctagtctgctggctgggaagggttttgctgtgatggctctggcttactataactatgaagacctccccaagaccatggagacgctccatctggagtactttgaagaagctgtgaactacttgctcagtcatcctgaggtaaaaggtccaggagttgggctgcttggaatttccaaagggggtgagctctgcctttccatggcctctttcctgaagggcatcacggctgctgtcgtcatcaacggctctgtggccaatgttgggggaaccttacgctacaagggcgagaccctgccccctgtgggcgtcaacagaaatcgcatcaaggtgaccaaagatggctatgcagacattgtggatgtcctgaacagccctttggaaggacctgaccagaagagcttcattcctgtggaaagggcagagagcaccttcctgttcctggtaggtcaggatgaccacaactggaagagtgagttctatgctaatgaggcctgtaaacgcttgcaggcccatgggaggagaaagccccagatcatctgttacccagagacagggcactatattgagcctccttacttccccctgtgtcgggcttccctgcatgccttggtgggcagtcctattatctggggaggggagcccagggctcatgccatggctcaggtggatgcttggaaacaactccagactttcttccacaaacacttgggtggccacgaggggacaatcccatcaaaagtgtaaattttatttgatcatgtggcctctctgttgctaatctctcctggaaacatctgccacatttagtgtgtgtatgtgtattcattctttctcataacttcttaaagtttcttcccctcattattaaaatgaatttaccagtaagaatgaaaaaaaaa

SEQ ID NO: 318 - DNA, 2610 bp, Homo sapiens
atggacttccccagctccctccgccctgcattgtttctgaccggcccccttggtctgagcgacgtccctgacctctctttcatgtgcagctggcgagacgcactgactctgccagaggcccagccccagaactcagagaatggggcactgcatgtgaccaaggacctgctgtgggagccggcaacccctgggcctctccccatgctgcctcccctcatcgatccctgggaccctggcctgactgcccgggacctgcttttccgcggagggtgccggtatcggaagcggccccgagtcgtgctggatgtgactgagcagatcagccggttcctcttggatcatggagacgtagcctttgcgcccctggggaagctgatgctggagaatttcaagctggagggagcggggagccgcactaagaagaagacagtggtcagtgtgaagaagctgctccaggacctcggtggacaccagccctgggggtgtccctgggcttacctcagcaaccgacagcgccgcttctctatcctcgggggccccatcctgggcacgtcggtggcgagccacttggcagagctgctgcacgaggagctggtgctgcggtgggagcagctgcttctggatgaggcctgcactgggggcgcgctggcctgggttcctggaaggacaccccagttcgggcagctggtctaccctgctggaggcgcccaggacaggctgcatttccaagaggtcgttctgaccccaggtgacaatccccaattccttgggaaacctggacgcatccagctccagggacctgtccggcaagtggtgacatgcaccgtccagggagaaagtaaggcccttatatacactttcctccctcactggctgacctgctacctgacccctggccctttccatccctcctcagctctgctggccgtccgctctgactaccactgtgccgtgtggaagtttggtaaacagtggcagccaacccttctgcaggcaatgcaggtggagaaaggggccacggggatcagcctcagccctcacctgcccggggagctggccatctgcagccgctcgggagccgtctgcctgtggagccctgaggatgggctgcggcaaatctacagggaccctgagaccctcgtgttccgggactcctcttcgtggcgttgggcagacttcactgcgcaccctcgggtgctgaccgtgggtgaccgcaccggagtgaagatgctggacactcagggcccgccgggctgtggtctgttgctttttcgtttgggggcagaggcttcgtgccagaaaggggaacgtgtcctgcttacccagtacctggggcactccagccccaaatgcctcccccctactcttcatctcgtctgtacccagttctctctctacctagtggacgagcgccttcccctggtgccgatgctgaagtggaaccatggcctcccctccccgctcctgctggcccgactgctgcctccgccccggcccagctgcgtgcagcccctgctcctcggaggccagggtgggcagctgcagctgctgcacctggcaggagaaggggcgtcggtgccccgcctggcaggccccccccagtctcttccttccaggatcgactccctccctgcatttcctctgctggagcctaagatccagtggcggctgcaggagcgcctgaaagcaccgaccataggtctggctgccgtcgtcccgcccttgccctcagcgcccacaccaggcctggtgctcttccagctctcggcggcgggagatgtcttctaccagcagctccgcccccaggtggactccagcctccgcagagatgctgggcctcctggcgacacccaacctgactgccatgcccccacagcttcctggacctcccaggacactgccggctgcagccagtggctgaaggccctgctaaaagtgcccctggctcctcctgtgtggacagcacccaccttcacccaccgccagatgctgggcagcacagagctgcggagggaggaagaggaagggcagcggctgggtgtgctccgcaaggccatggcccgagggcagctcctgctgcagagagacctgggctccctccctgcggcagagccaccccctgcacccgagtcaggcctagaggacaagctcagtgagcgcctgggggaagcctgggcaggccgaggggctgcctggtgggagaggcagcagggcaggacctcggagcccgggagacagaccaggcggcccaagcgccggacccagctgtccagcagcttttcgctcagtggccatgtggatccctcagaggacaccagctcccctcatagccctgagtggccacctgctgatgctctgcccctgccccccacgaccccgccctcccaggagttgactccggatgcatgcgcccagggcgtcccatcagagcagcggcagatgctccgtgactacatggccaagctaccaccccagagggacaccccaggctgtgccaccacacctccccactcccaggcctccagcgtccgggccactcgctcccagcagcacacacccgtcctctctagctctcagcccctccggaagaagcctcgaatgggcttctga

SEQ ID NO: 319 - DNA, 1851 bp, Homo sapiens
atggcagaagatgagcctgatgctaagagccccaagactgggggaagggcccccccaggtggtgctgaggctggggaacctaccacccttcttcagaggctccgaggtaccatttccaaggccgtgcagaacaaagtagaggggatcctgcaagatgtacagaaattttctgacaatgacaagctgtatctctaccttcagctcccctcaggacccaccactggagacaaaagctcagagccaagtacactgagcaatgaggagtacatgtatgcctataggtggatccgcaaccacctggaagagcacactgacacctgtctgccaaagcaaagtgtttatgatgcctatcggaagtactgtgagagtcttgcctgttgccgcccactcagcacagccaactttggcaagatcatcagagagatcttccctgacatcaaagctcgaaggcttggtggccggggccagtccaaatattgctacagtggcataaggaggaagaccttggtgtctatgccacccctgcctggacttgacctaaagggttctgagagtccagaaatgggcccagaagtaaccccagcacctcgagatgaactggtggaggcagcgtgtgccctgacctgtgactgggcagagcggatcctgaaacggtccttcagttccatcgttgaggtcgcccgcttcctgctacagcagcatctcatctctgcccgatctgcacatgcccatgtgcttaaggccatggggctcgctgaagaggacgaacatgcacctcgggaacggtcatctaaaccaaagaatggtttagagaacccagagggtggagcccacaagaagccagagagactggcccagcctcctaaggatctggaagcccgaactggggccggtcctctcgcacgtggagagcggaagaagagtgtagttgagagctcggccccaggagccaataacctgcaggttaatgccctagtggctcggctgcctctgctccttccccgggcccctcgctcactaattccgccaatcccagtctctccacctattctggcccccaggctttcttcaggtgccctgaaagtggctacactgcctctgtctagtagggccggggcacccccagcagctgtgcccatcattaacatgatcttaccaactgttcctgctttgcctggacctggacctgggcctgggcgagctccacctgggggactcactcagccccggggcacagagaacagagaggtaggcataggtggtgaccaaggaccacatgacaagggtgtcaagaggacagctgaagtacctgtgagtgaggccagtgggcaggctccaccagctaaagcagcaaagcaggatatagaggatacagcaagtgatgccaaaaggaaacgggggcgccctcgaaaaaagtcaggtggaagtggggaaaggaattctacccctctcaagtcagcagctgccatggaatctgcccagtcctcaaggttaccatgggagacatggggctcaggaggggaaggcaactcagctggaggggcagagaggccagggccaatgggagaggctgaaaagggggcagtacttgcccagggtcagggagatggtactgtttccaaaggaggaaggggccccggttcccagcataccaaagaagcagaagataaaattcccttggtcccctcaaaagtgagtgtcatcaagggcagcagaagccaaaaggaggcttttcctttggcaaagggagaggtagacactgcaccacagggtaataaagacttaaaggagcatgtgcttcaaagttccttatcccaggagcataaagacccaaaagcaacacccccatga

SEQ ID NO: 320 - DNA, 2400 bp, Homo sapiens
atgttggaagaagaaacagatcaaacctatgagaatgtcctggctgagattcagtctttcgaactgcctgttgaagctactttaaggtctgtgtatgatgaccaaccaaatgcgcacaagaagtttatggaaaagttagatgcttgtatccgtaatcatgacaaggaaattgaaaagatgtgtaattttcatcatcagggttttgtagatgctattacagaactccttaaagtaaggactgatgcagaaaaactgaaggtgcaagttactgataccaaccgaaggtttcaagatgctggaaaagaggtgatagtccacacagaagatatcattcgatgtagaattcagcagagaaatattacaactgtagtagaaaaattgcagttatgccttcctgtgctagaaatgtacagtaagctgaaagaacagatgagtgccaaaaggtactattctgccctaaaaactatggaacaattagagaatgtgtactttccctgggttagtcaataccggttttgtcagctcatgatagaaaatcttcccaaactccgtgaggatattaaagaaatctccatgtctgatctcaaagactttttggaaagtattcgaaaacattctgacaaaataggtgaaacagcaatgaaacaggcacagcatcagaaaaccttcagtgtttctctgcagaaacaaaataaaatgaaatttgggaaaaatatgtatataaatcgtgatagaattccagaggaaaggaatgaaactgtattgaaacattcacttgaagaagaggatgagaatgaagaagagatcttaactgttcaggatcttgttgatttttcccctgtttatcgatgtttgcacatttattctgttttgggtgacgaggaaacatttgaaaactattatcgaaaacaaagaaagaaacaagcaagactggtattgcaaccccagtcgaatatgcatgaaacagttgatggctatagaagatatttcactcaaattgtagggttctttgtggtagaagatcacattttacatgtgacccaaggattagtaaccagggcatacactgatgaactttggaacatggccctctcaaagataattgctgtccttagagctcattcatcctattgcactgatcctgatcttgttctggagctgaagaatcttactgtaatatttgcagatactttacagggttatggttttccagtgaaccgactttttgaccttttatttgaaataagagaccaatacaatgaaacactgcttaagaaatgggctggagttttcagggacatttttgaagaagataattacagccccatccctgttgtcaatgaagaagaatataaaattgtcatcagcaaatttccctttcaagatccagaccttgaaaagcagtctttcccaaagaaattccccatgtctcagtcagtgcctcatatttacattcaagttaaagaatttatttatgccagccttaaattttcagagtcactacaccggagctcaacagaaatagacgatatgcttagaaaatcaacaaatctgctgctgaccagaactttgagtagctgtttactgaaccttattagaaaacctcatataggtttgacagagctggtacaaatcatcataaacacaacacacctggagcaagcttgtaaatatcttgaggactttataactaacattacaaatatttcccaagaaactgttcatactacaagactttatggactttctactttcaaggatgctcgacatgcagcagaaggagaaatatataccaaactgaatcaaaaaattgatgaatttgttcagcttgctgattatgactggacaatgtctgagccagatggaagagctagtggttatttaatggaccttataaattttttgagaagcatctttcaagtgtttactcatttgcctgggaaagttgctcagacagcttgcatgtcagcctgccagcatctgtcaacatccttaatgcagatgctactggacagtgagttaaaacaaataagcatgggagctgttcagcagtttaacttagatgtcatacagtgtgaattgtttgccagctctgagcctgtgccaggattccagggggataccctgcagctagcattcattgacctcagacaactccttgacctgtttatggtttgggattggtctacttacctagctgattatgggcagccagcttctaagtaccttcgggtgaatccaaacacagcccttactcttttggagaagatgaaggatactagcaaaaagaacaatatatttgctcagttcaggaagaatgatcgagacaaacagaagttgatagagacagtcgtgaaacagctgagaagtttggtgaatggtatgtcccagcacatgtag

SEQ ID NO: 321 - DNA, 1281 bp, Homo sapiens
atggctcacctccggggatttgccaaccagcactctcgagtggaccctgaggagctcttcaccaagctcgaccgcattggcaagggctcgtttggggaggtctacaagggcatcgataaccacacaaaggaggtggtggccatcaagatcatcgacctggaggaggccgaggatgagatcgaggacatccagcaggagatcactgtcctcagtcagtgcgacagcccctacatcacccgctactttggctcctacctaaagagcaccaagctatggatcatcatggagtacctgggcggcggctcagcactggacttgcttaaaccaggtcccctggaggagacatacattgccacgatcctgcgggagattctgaagggcctggattatctgcactccgaacgcaagatccaccgagacatcaaagctgccaacgtgctactctcggagcagggtgacgtgaagctggcggactttggggtagcagggcagctcacagacacgcagattaagaggaacacattcgtgggcacccccttctggatggcacctgaggtcatcaagcagtcggcctacgacttcaaggctgacatctggtccctggggatcacagccatcgagctggccaagggggagcctccaaactctgacctccaccccatgcgcgtcctgttcctgattcccaagaacagcccacccacactggagggccagcacagcaagcccttcaaggagttcgtggaggcctgcctcaacaaagacccccgattccggcccacggccaaggagctcctgaagcacaagttcatcacacgctacaccaagaagacctccttcctcacggagctcatcgaccgctataagcgctggaagtcagaggggcatggcgaggagtccagctctgaggactctgacattgatggcgaggcggaggacggggagcagggccccatctggacgttcccccctaccatccggccgagtccacacagcaagcttcacaaggggacggccctgcacagttcacagaagcctgcggagcccgtcaagaggcagccgaggtcccagtgcctgtccacgctggtccggcccgtcttcggagagctcaaagagaagcacaagcagagcggcgggagcgtgggtgcgctggaggagctggagaacgccttcagcctggccgaggagtcctgccccggcatctcagacaagctgatggtgcacctggtggagcgagtgcagaggttttcacacaacagaaaccacctgacatccacccgctga

SEQ ID NO: 322 - DNA, 2076 bp, Homo sapiens
actgtctacagcactgatacgtgactgtcaagttatcagagagactaaagaagaccagattgcagagctgaaaaagatatgtgaacaaagtacggaatctctaaataatgactgggaaaaaaagcttcacaatgctgtagcagaaatggaacaggaaaagtttgatcttcaaaagcaacacactgaaaacattcaagaattgcttgaggatacaaatgtgcgtctgaataaaatggagagtgaatacatggcgcaaacacagtccacaaaccacatgatcaaagaactggaggcccgtgtccagcagctgactggagaagcagagaacagtaatttacagaggcagaaattaattcaagaaaaagcagaacttgaaagatgttaccagataacgtctagtgaattacaagaagtaaaggcaaggcgtaacacactgcataaagagaaggaccatcttgtaaatgattatgagcaaaacatgaaactgttacaaaccaaatatgatgctgatataaaccttctaaaacaagaacatgctctttcagcttctaaggcatctagtatgattgaagaattagagcagaatgtctgtcaattaaaacagcagttacaggaatcagaacttcaaagaaagcaacaactaagggatcaagaaaataagtttcagatggagaaaagtcatctaaaacacatctatgaaaaaaaggctcatgacttgcagagtgaacttgataaaggaaaagaagatactcaaaagaaaattcataaatttgaggaagctttgaaggaaaaagaggagcagctaactcgtgtgactgaagttcagaggttgcaggcccagcaggcagatgccgctctggaagagtttaagcggcaggtggaactgaactcagagaaagtctatgctgaaatgaaaaagcagatggaaaaagtggaggcagatctaactagatccaaatctcttcgtgagaaacaatcaaaggagtttttatggcaactggaggacatcagacagcggtatgaacaacagatagtagagctgaagctggagcatgaacaggagaagacgcacctattacagcagcataacgcagagaaggatagcctagtccgagaccatgaacgggaaattgaaaacctggaaaaacagcttcgcgctgccaatatggagcacgaaaatcaaattcaggagttcaagaaacgagatgcacaggttattgccgacatggaggcccaggttcacaagttgagagaagaattgatcaatgtgaactcacagcggaaacagcagctggtagagcttggtcttcttcgtgaagaggaaaagcaaagggctacaagggaacatgagattgtcgtcaataaactgaaggctgaatcagaaaagatgaaaatagagctgaaaaagactcatgctgctgagacagagatgacactggaaaaggccaacagcaagctgaagcagattgagaaggaatacactcagaagcttgccaaatcttcacagatcatagcagaacttcagacaaccatttcctctctgaaagaagagaacagccagcagcagcttgctgcagaaaggcggctccaggatgttagacaaaagtttgaagatgagaagaagcagctgattagagataatgaccaagcaatcaaggttttacaagatgaattagaaaaccgttctaatcaggtgcgatgtgcagagaaaaaattacaacacaaagaattggagtcacaggaacagataacttacatacgacaagaatatgaaacaaaattgaaaggattgatgccagcatccctaagacaagaacttgaagacaccatttcctccctaaaatcacaggttaattttctgcaaaagagagcttccatccttcaggaagaactgactacatatcaaggcagaaggtaactgcacgagagaatgcaacggatgcaatttccaggctgtgctgtggacttcttccagcaggtttgaagatttggatattgtaaactgtgagatcagtggcattttttaaatccttaaatgtaattaagatcataaaaacatgcatcattcataaaaaa

SEQ ID NO: 323 - DNA, 2304 bp, Homo sapiens
aatcatgcttacgcatataggttaaccacagttatgtaagcaggttctgagaaaaggtgagaaagagaatggagagttttgctacaacagaggcaggattctgaatttatttccagctgcccatcttgtccctcctggagacctaacccctccagcacctacacacacagcctctttagaagcaactatcctgccactggctcagaaaggctgagtcctaagaattctaaaatcttgctcctaagaaatctcaagcttcttttgtgaaatcatagcccactaatgagttttggagccagctttgtcagttttttgaatgccatgatgacatttgaggaagaaaaaatgcagttggcatgtgatgacttaaaaaccacagaaaaactgtgtgaaagtgaagaggctggagtaattgaaacaatcaagaataaaattaagaagaacgttgatgtccgaaaatccgccccctctatggttgatcggcttcagaggcagataatcatagctgactgccaggtttacctggctgtgctttcatttgtaaaacaagaattgtcagcttatatcaaaggtgggtggatccttaggaaagcctggaagatttacaataaatgctatctggacatcaatgcccttcaggagctgtatcagaagaagctaactgaagagtccttgacttctgatgctgcaaatgataatcacattgtggctgaaggggtgtctgaggggtctctgaacagactgaaaggtgctgttagctttggatatggcctttttcacctttgcatatccatggtgcccccaaacctgctcaaaatcatcaacctgctgggttttcctggagaccgcctacaggggctttcttcactgatgtatgcaagcgtaagtaaggacatgaaggcccctttagctacattagctctgctctggtatcatactgtagtccgcccgttttttgccttggatggcagtgataacaaggcaggcctggatgaagctaaggaaattctccttaaaaaagaagctgcttatccaaattcttccctctttatgtttttcaagggacggatacaacgactagagtgtcaaatcaacagtgccttgacatctttccacactgctttggaacttgcagtagaccagagagaaattcaacatgtctgtctgtatgaaattggttggtgcagcatgatagagctcaatttcaaggatgcatttgattcctttgagaggctaaaaaatgagtccaggtggtcccagtgctattatgcctacttgactgcagtttgtcagggagccactggtgatgtggatggggcacagattgtctttaaagaagttcagaaactcttcaaaaggaaaaacaatcagattgaacagttctcggtgaaaaaggcagagcgatttcggaagcaaaccccaaccaaagcgctctgtgtgttggcgtctattgaagtgttgtacttgtggaaagctcttccaaactgttccttccccaacctgcagaggatgagtcaagcttgccatgaagtggatgactcatctgttgttggattaaagtatttgcttcttggtgccatacacaaatgtctaggaaactcagaagatgctgttcagtacttccagcgagctgttaaagatgaattgtgtcgtcagaataatttatatgttcagccgtatgcctgttatgaacttggctgtcttctattagacaaaccagagactgtaggaagaggcagagctctacttcttcaagcaaaggaggatttctctggctacgactttgaaaacagattgcatgtccgcatccatgctgctctggcctctctgagggaattggttcctcagtgacagacccggaacacccgctccgtccctccccacccagggtccgcactttaaaataaaagcagaggacaaagctcttgtgaagatgggcttttcttctgaaaaccacctgtgccagggacacattttcccagttaagctgacatattaaagatctcctcttttaaacatgtagctgaaaagtaataatgatgttgaggaggatgatgatggtaataataactaaccacctggggagagggttaagtgaccttgctcaaacgttttagttttgtgatttattatttttaaaataaaatcaaacggaacatccaacccaagatcctgtaggaacacctaccttaagcacatatctgaatgggtaacatgatgaggtacctgtaaaattattaacaatatcatgacatagcatttatatttgtgttttgaaaaaataaaagtgctttctagtgtttt

SEQ ID NO: 324 - DNA, 774 bp, Homo sapiens
atggcgtcgaagataggttcgagacggtggatgttgcagctgatcatgcagttgggttcggtgctgctcacacgctgccccttttggggctgcttcagccagctcatgctgtacgctgagagggctgaggcacgccggaagcccgacatcccagtgccttacctgtatttcgacatgggggcagccgtgctgtgcgctagtttcatgtcctttggcgtgaagcggcgctggttcgcgctgggggccgcactccaattggccattagcacctacgccgcctacatcgggggctacgtccactacggggactggctgaaggtccgtatgtactcgcgcacagttgccatcatcggcggctttcttgtgttggccagcggtgctggggagctgtaccgccggaaacctcgcagccgctccctgcagtccaccggccaggtgttcctgggtatctacctcatctgtgtggcctactcactgcagcacagcaaggaggaccggctggcgtatctgaaccatctcccaggaggggagctgatgatccagctgttcttcgtgctgtatggcatcctggccctggcctttctgtcaggctactacgtgaccctcgctgcccagatcctggctgtactgctgccccctgtcatgctgctcattgatggcaatgttgcttactggcacaacacgcggcgtgttgagttctggaaccagatgaagctccttggagagagtgtgggcatcttcggaactgctgtcatcctggccactgatggctga

SEQ ID NO: 325 - DNA, 491 bp, Homo sapiens
agttcccagagccacagacaaaaggtcctcggaggaatctttctctaaactgcttctcctttccaacttcccaaatttgacctcctccagggaccatccttttctgaccacaggaaaagcccttccttaaatcctttaaagcctaggcttaggggattgggctcctgctttaagaggagcatggcagagcgatcaagcacagggacccagcctgcgtctgaagtcactgtcagctctgtcactcactatttccatggcttcggcactttactaacttctctgtgcctctacttcctcttctgaaaatggggacgccgaggtccatggcgttcacctcggagaattaaataaatgaagatgtggaacatccttagaacggtgcctggcacatgcagcctgaacagaactgctgtgcaggaagagaagtgaagacggagaccacccagcgagcacaatgctcaaaggcccaatggatccactcctgaccctgg

SEQ ID NO: 326 - DNA, 1704 bp, Homo sapiens
gatgcagacgccgcggccggcgatgaggatggaggccggggaggcagcgccgccggcgggggcgggcggccgcgccgcaggcggctggggcaagtgggtgcggctcaacgtggggggcacggtgttcctgaccacccggcagacgctgtgccgcgagcagaagtccttcctcagccgcctgtgccagggggaagagctgcagtcggaccgggatgagaccggggcctacctcattgaccgtgaccccacctacttcgggcccatcctgaacttcctccggcatggcaagctggtgctggacaaggacatggctgaggagggggtcctggaggaagccgagttctacaacatcggcccgctgatccgcatcatcaaagaccggatggaagagaaggactacacggtcacccaggtcccacccaagcacgtgtaccgcgtgctgcagtgccaggaggaggagctcacgcaaatggtctccaccatgtctgatggctggcgcttcgagcagctggtgaacatcggctcctcctacaactacggcagcgaggaccaggcagagttcctgtgtgtggtgtccaaggagctccacagcaccccaaacgggctgagctcagagtccagccgcaaaaccaagagcacggaggagcagctggaggagcagcagcagcaggaggaggaggtggaggaggtggaggtggaacaggtgcaggtggaggcagatgcacaggagaaaggttcccgtccgcaccctctcagacctgaggctgagcttgcagtgagggcttctcctcggcccctcgcccgcccccagagctgccatccctgctgttacaagccagaggcacccggatgtgaggccccagatcacctccagggacttggggttcccatctgaaatcctttatttttgtaccatggggtgggccccgggcctgagaaggaagaagcaccctctccccggcctcctctgtctgcacccgtggggctgtgacttactcctgcctccaggggcggggcggggcccccctgggacctcttaaggcccaaggtgggccccaggacctctgggcagagtggactgctcatggcagatgtgtggcaatgtctggctgtgtctctccggcacctgcgtcccctctcccgggctcccctgctgcatggtggatgtgctccttcctggcccggtcacattgcctccttgagccttagtccagggggtcactcctcccaccccacctacctcacagggttgttgtgagggtgcacagaggagcaaagtccctgaaggccctcaggcagtatataggggccgcccaccttcagctgccctgggatgggaaggacccagcccgacccctgggcataacactgtgtttgcaaatggagattcaggtattggggatgcaggttgtggggagctggcctggcagagtaggggtagttggcttggccttctctttggtgatcccacccccagccatttgcattgctggcccagcgcctggcctggggggcggggagaggcagcagaaggggctgggcaggggcggtggaggactcaggaactgcccggggagagtgggtatggcggctgagccaggggccctcctgtgtttgacttcccgggatgggtccttgcttctcagctgtgtccgaccccaccatgtaataaaacccaaaggaacagcccaaaaaaaaaaaaaa

SEQ ID NO: 327 - DNA, 1806 bp, Homo sapiens
atggcggagccgagcggggccgagacgaggccccccattcgggtcaccgtcaagacccccaaggacaaggaggaaattgtgatctgcgatcgagcctcggtcaaggagttcaaagaggaaatctcccggaggtttaaggctcagcaggatcagctggtcctgatcttcgcaggcaagatcctcaaggatggggacacactgaaccagcacggaatcaaggacgggctcactgtccatctggtcatcaagacccctcagaaggctcaagatccagctgctgccactgcttcttccccctccacacctgaccctgcctcagcaccctccaccacgcctgcttcacccgccacccctgcccagccctccacctctggcagtgcctcttcagatgctggcagtggaagccggaggagcagtggtggggggccctctccgggggctggggagggatcccccagtgctactgcgtccatactctctggctttgggggcatcctggggctgggcagcctaggcctgggctctgccaacttcatggagctgcagcagcagatgcagcggcagctgatgtccaatcctgagatgctgtcacagatcatggagaaccccctggtccaggatatgatgtctaaccctgatctgatgcgtcacatgattatggccaacccccagatgcagcagttgatggagcggaaccctgagatcagccacatgctcaataaccctgaactcatgaggcagacaatggagcttgctcggaatccagccatgatgcaagagatgatgcggaaccaggaccgggccctgagcaaccttgagagcatccctggagggtataatgccctccgccgcatgtacacggacatccaggagcccatgttcagtgctgcccgggaacagtttggcaacaatcccttctcttccctggccgggaactccgacagctcatcctcccagcctctgcggactgagaatcgagagcccctccctaacccctggagcccctcgccccccacctcccaggcccccgggtccggtggggagggcaccggaggatcggggaccagccaggtgcacccgacagtctcgaacccctttgggatcaatgcggctagcctggggtcagggatgttcaatagcccagaaatgcaagccctcctccagcagatctctgagaacccccagctgatgcagaatgtgatctcagcaccctacatgcgcagcatgatgcagacgcttgcccagaaccccgactttgctgctcagatgatggtgaatgtgccgctcttcgcggggaacccccaactgcaggagcagctccgcctgcagctcccagtcttcctgcagcagatgcagaacccagagtcactctccatccttaccaatccccgagccatgcaggcattgctgcagatccagcagggactacagaccttgcagaccgaggcccctgggctggtacccagccttggctcctttgggatatcccggaccccagcaccctcagcaggcagcaacgcagggtctacgcccgaggcccccacttcctcaccagccacgccagccacatcttctccaacaggggcttccagcgcccagcagcaactcatgcagcagatgatccagcttttggctggaagtggaaactcacaggtgcagacgccagaagtgagatttcagcagcagctggagcagctcaactccatgggcttcatcaatcgtgaggctaacctgcaggccctgattgccacaggaggggacatcaacgcagctatcgagagactgctgggctcccagctctcctaa

SEQ ID NO: 328 - DNA, 1794 bp, Homo sapiens
atggtcccggaggagaggagggtaggtttgtcttctgatgagacatcatctgattcccttaagtcttggcactccatatgtgtcttggacagcaaagaacagcccttggcctgccagcagaaacagaggcagttcgtgaagccagtgactgagtcagagcagcccacagtgctggaactcctgctagctgagctccgaactctgttctcagctgtgttgcaggacagtagccctgcagcttggcgctatcttcatgcagtactgggtctactgcctccatatcgtgagttgctagttggccaccttgatttgctgcccttcctggagcagctgtactgctgggcaccctgggtccaaacccacctccatctggacctgctaggtgccattgtccaggcctttcctccagacagctctttgttagacagtgcttcccatgctgactgctgtccccagaagcggaggctccatcacaggcccccatgcccagcttgcccttttgtgcaggcccagtggagcaggcagcaagtaaaggaggagctggccacctggctgcgaccattgacactgcctgagctacagcgctgcctgggcattgttggtgctcaggtggccctagaagaggctgtgtggctggatggacttagtctccttcccttggcactggcagcggacatccctgtacggtatgaaagcagtgacactgacaatgcagaggtggagcctgttggaagaaaagagaccaggtctcagcttgactatgaagttcccagggaaaaggccttccaaaagagcagcaccggcttttcacctgagacttccttcctggatagccaggtgatgactgctctgaagatggagagatacctgaagaagatccacttcctctatctcaatgtggctcccagccggtactttaggccttacagcctgatggtggtgccacccgacaaggtgaatcccgagcactacatcttctctccctttgggatcttgcatgtacatcctgtggaaggtagcgagacgatgacactgggtacctggcaccatcactgtgttctctggcagcagctccagttcattccattctttaagtattgcctcttacgcaagtcctttacctgttggaagaagaatgtgagattacaggggctgcatcgactccagaaattcctagagaatcatctgctcttggctgtgccccactttggagctgggctactccatattagcaggcttctgcaggagctacactctgtgtcctggctaccccaggaactggatcggtgctatgagctgctggacctgcagacggctctagccgaggagaagcataaggctctacggctgctccatcgttgcctaaacctctgcacatccattcttcgactggttcacgaggacacataccacatgcaacagtgcctacaggagcgagtacaaaactgtgacaggatcaggacaggccaaggctccatataccttcagagggtacagcacaagcaactggagcagaagctgaagcaagcagaggcctggtggctgcagctgggaaagtttgcccgcctggttgactacatgatttgtcagagcctcatttctgtcttggaagagcagataacctcttttgtggccaacatccttcaagccccaaggcagaaaccctttctctcatcacagctggtctttgatgatcatggtcaactgtctcatgtgccctgtgttgaaaatatgatccagactctaactggaggcctacagtctgtcaagacctctgccttgcaggtattctga

SEQ ID NO: 329 - DNA, 5088 bp, Homo sapiens
ggcctttttttttttttttttttttttttttttttactattcccttggatctggcttcccaaagtctttttgctttcacctggtcagacccagatactcacacatctacctaactaacagactgtactcccacaggggttccgggatagccccctcctatttgggcaggctctcaccaaggaactaatcgagcttccccttgctcctagcagcctccttcaatacatcaatgacctccttatgtgtagtccctcctttgatctatccatcaacacatcacccaacttctaaatttcctctatggccagggatatcaggttttacctacaaaggctcaagtagcccaaacccaagtcactaaccttggactcaccctaacccctaattcttgagccatgccagcccgatggaaggagctaatacaggatgtgccccttccccacaccaagaaggacccttcctttttgggccttgttgggtacttccagctgtggatcattaactttggcctgttgaccaaaccactctgcacggcatcacgtgggtccatcctagaacatttggacccagcttgcccattaactcccacttctaaaaactgaaagatgcccttttaatgtcccagcactaggactacccaattccattaaaccctttaccctgtatgttcattgtaatcaaggccttgcccttggatttctctgccaaacccgtggcaacactccagaagccattgcatacttctgaaaactggactctatcatccaaggctggcctccatgcttgaaagttctggatgcagctacattgctggcctcagaggcacaaaaactcaccctctaccagcacattactattgcatcttcccataacttatgggaccccatgagccattgatctcttcttttcctcctgccatccagcttacagcaaccctctaacaccttccagagatgtaaaattctaaatccaaccaccctcctccctataagtacttccaattctgaatcccccactcttgcctagacctcttagcctccctctcctcccctttccaacacatttcagaagcccctttgcggaaggaacccacatggttcattgatggaagctcttttaaggaaccatatctggcagctggctatgccatcattgccgaaaacaaactcctataatccaatgctctctcatcacatatcacctcacaacaagcggaactatttgccctaaccaagaccctcactctagcaaagggaaagagggtcaacatttacaccaattccaaatatgcataccatgtcctacagtctcacactgtaatctggcaggaaaggggtttttctaactacaaaaagaaccgccataataaatggcaaactcatacacaagccgctggaggcagctaaactaccactagaggccgtcattatccattgcaagggacaccaaaaggctacagatgccataaccaagggaaacttcttagcagattcggcagcctggcaggcagcccttagaacactattgttattgcccattttccctagcatacacccaagaagaaaaaggtgccttgctggctccagggctgttcataacgaaagctgaatttacttagactacaaactcatcctacccaagacccaaaaactttctgttctcacccacatccataaccaattccatgcgggttatctcccgttgctccaatttctaaaaacctgtatacattcccttaccatggccatcagcttggaccgcctcactaaaggttgctctgcctgcagtcagacttcccctcaggggcccttagaccacctccttttccctcccttcaggcccaaaggccagttgccgggacaggattggcaaattgacttcactcatacgttcccccataaagaaagtctgatatctcctcacgatggtagataccttttcaggtggatagaagcctttcttactaccactgaaaaggcacacaccattgcctctaccttcctcacacacatcatcctttgattcagcctcccctcatctatacaactggacaattgaccagcatttatctcccaagtcactcaacaggtttctaagtctttaaacatcatatgggtttttcacattctctatcacccccaatcctcgggtaaatttgaacaggcgaatgccctcttaaaacaacagttaaccaaactttccctagagatcaaaatgaaaactgaatatcacttcttcccttggcccttatgtgcctcagggccctcccccgaaaacctctaaatctaagtccttttgaacttttgtatggacgttctttcgtcctacagaactttgctccatcccctcccttacaggacacctggccagcactgcacctcactcaacacttagtccgacagtacactgacactcacctccccaaacctgaggattcttcccaattcactttcttacccttacagccaggagactgggtctgggtagcacacccctcctcccctttccaacaaaatggaagggtccctatcaggttatattcaccatccccgctgctgcaaagttaacatcctttccctattgtatacaccattccaaatttaaaaaggcacccggcccacaccccgaagtctcctcaccccggaaatattcttcctttcccacaggaccaacctcgctgtgcctaacaagaattccagaagtcacccatccgaaaggcactggcccatgacactctccacttccaatcttaaatcttttacttcataccttgtctcagatctctcctggtaccccttccccacgcccttagataatccatctcaattcctcatgctaattgaggagctatggctgcaaggcaccttccaggatttcacacctacacaaatctcctttttctccttttgccttctctgcttatgggatattctgagtccccacccccaatcactgacagctgggcccccttcatcagcctcacacaccacgtattaagtcagtcacaatctcccctctcctctaactgctggatttgtctttctacacacacccaatgattcacggctcttccggctgacctacttacatggacacagtccaacgtgagcttacacatttcttacttggctataccattcttggctgattcattcctgaaaccggttcataacctggaaactcagctaaacacctttccttcaaactcagctctctcagcatggtttcaggtagggctgttgccctccttcacctaatagcttctggactaacatccatacaaaccaacacagcatcatctaaaccaccaatatgggggtaccatttctactcaaacttccttcatatccccaccccccttatgtctcagccgaacctaccctaatccagcccacgccacaatggtgggacaggttccccagtccctatgtggtcttatttttacccttgcactccctgtagaccatcaattctacaccctaattacaaaatcatatccacctctgcctggcagaaggtgttatgcttttctggctcgcctaccatccacacatccctacacctcaccaccggatcctcttttctttccttccatccaattcctggcttccccgctgccaactctgctctctatgtctccagtttaaaggtgccccctggaaaaaatgtaacaattccctcacctgtgactggtacctgacagccaccacaccggggcagcaatggctaacggttgacaaagacaatttctttctctctccaaaaccaaacagccttcatcaactccctagccaagactccctatcaggcccttacaggtgccgctctggctggcagttacccaatttgggaaaacgaaaataccctatcatggctacctaccttcacctacaacttctgcctgtccacccccagtctcttctttttgtgtgatacaaactgatatctttgcctaccagccaactggtcaggaacttgcaccctggtctttcaggctccaaccatcaacatcctaccccctaaccaaactattctaatttctgtagaagcctctatctcctcttcacccataagaaataaatgggctctacatctcatcaccctgctaacaggattaggcatcactgctgcacttggcactggaatagcaggcataaccacctcaatcacctcataccaaacactattcacaaccctttctaacaccgtagaagatatgcacacttccattaccagtctccaacgacaattagacttcctcgtgggagtcatccttcaaaactggagagtcctggacctcctaaccactgagaaagggggtacctgcatatacctccaggaagaatgctgtttctgtgttaatgaatctggcattgttcatatcgcagttcgtaggcttcatgacagggctgcagagctttgacatcaagtcgctgactcctggtggcaaggatcatcccttctaagatggataccctgggttgcccccttcctaggacccctgatcttcctcttcctgttactaatgattgggccatgcatatttaaccttgtatcccgcttcatttcccaaaggctgaattgttttatccaggcaagcatgcaaaaacacattgataatatatttcacctttgccacgtctaataccagagcctacgaggaaaccattcggaagctccagaacccaggccctaatcacaacgcccctatccagcaggaagcagccagatgatcaacgacgccctttttcctttttatactaaagtaagaaataagaatgttagcccaaactgcactattttgcagacccctaccattttacaaactggtcagagtggaaaattccaccagggcctgagctgtgagaaacatcctgtcaggcaggtcccaggcctaacccctggctgcactaaattccttcattatcagcagccaaacacaccgcccccaccccattttcacaacaatcccagacctctcctgcccgggactgtaactggtccagcctgtaagcgggaagggggctctggcactagctggtaccccctctccgcaggtctttctcccaataaatctgtgttgccatt

SEQ ID NO: 330 - DNA, 6099 bp, Homo sapiens
atgggagatgacagtgagtggttgaaactgccagttgatcagaaatgtgaacacaagctgtggaaagcaaggttaagtgggtatgaagaggccctgaagatcttccagaaaataaaggatgaaaagagcccagagtggtccaaatttttaggattgatcaaaaaatttgtcactgattccaatgcagtggttcaattgaaaggattagaagctgcacttgtttatgttgaaaatgcccatgtagcaggaaaaaccacaggagaagttgtgtcaggtgttgtaagtaaggtgttcaatcaacctaaagctaaagccaaggagctgggcatagagatctgtcttatgtacatagagattgagaaaggagaggctgttcaagaagagctcctgaaaggcttggacaataagaatcccaagatcatagtggcctgtatagagacactgaggaaagccttaagtgaatttggttccaaaatcatcttgcttaagccaattatcaaagtgttgccaaaactctttgagtctcgagagaaggctgttcgagatgaagccaaactaattgctgtggagatttacagatggattcgggatgctctgagacccccattacaaaatataaactctgttcagttgaaagaactagaagaagaatgggtcaaactgccaacaagtgctcctagacctactcgatttcttcgttcccaacaagaactagaagctaaattggaacaacaacagtctgctggtggagatgctgaaggaggtggtgatgatggtgatgaggtgccacaaatagatgcttatgagcttttagaagctgtagaaatcctttccaaacttcccaaagacttttatgacaaaattgaggcaaaaaaatggcaagagagaaaagaggccctggagtctgtagaagtactaataaaaaaccccaaactggaagctggcgattatgcagatttagtaaaagcattaaagaaggttgttggaaaggacaccaatgtcatgttggtggctttggcagcaaaatgtcttactggcctggctgttgggctaaggaagaaatttggacaatatgcaggacatgttgtgccaaccatcttggagaaattcaaagagaagaaacctcaagtggtacaagccctgcaggaggcaattgatgcaatcttccttactaccacactacagaacatcagtgaggatgttttagcagtaatggataataaaaatccaaccatcaagcagcagacatctctttttattgcaagaagtttccgccactgcactgcttctaccctgccaaagagcttgctaaagcccttttgtgctgcactacttaagcacatcaatgattctgctcctgaagtcagagatgccgcatttgaagcattgggtactgctttgaaggtggttggcgagaaagcagtaaacccattcctagctgatgtggacaaactcaagcttgataagatcaaagaatgttcagaaaaggtagaactgatacatggtaagaaagctggactagctgctgataagaaggaattcaaacctctgcctggaaggactgctgcttcaggggctgcaggagataaggacacaaaggacatttctgcacccaaaccaggacctctaaaaaaggcacctgctgctaaggctggtgggccaccaaaaaaggggaaaccagctgcaccaggaggcgcagggaatactggaaccaagaacaagaaaggactggagactaaagaaatagtggagcctgagctctcgatagaagtatgtgaagaaaaagcttcagctgttcttccccctacctgtatacagcttcttgacagcagtaactggaaagaaaggctggcttgtatggaagagttccagaaggctgttgagctaatggaccgaactgaaatgccatgccaggcattagtgaggatgctagccaagaaacctggatggaaagaaactaattttcaggtgatgcaaatgaagcttcatatagttgctttgattgcccagaagggaaatttttccaaaacgtcagctcaggttgtattagatggccttgtggacaagattggagatgtgaaatgtgggaacaatgcaaaagaagctatgacagcaatagccgaagcctgtatgttaccatggactgctgaacaggttgtgtcaatggctttctcacaaaagaatcccaaaaatcagtcagaaactctgaattggctatcaaatgccataaaagaatttggtttttctgggttgaatgtcaaagctttcattagcaatgtgaagacagctcttgctgcaacaaacccagctgtgaggactgctgccataaccctgcttggcgtgatgtatctgtatgttggtccctctttgcgaatgttctttgaggatgagaagcctgccctcctatcccagatagatgcagaatttgagaagatgcagggacaaagtccacctgctccaaccagaggaatttccaagcatagcacaagtggtacagatgaaggagaagatggagatgaaccagatgacgggagcaatgatgtcgttgatcttttgccgaggacggagatcagtgataaaatcacttcagagttggtatctaagattggtgataagaattggaagattaggaaagaaggcctagatgaagtggcaggtattattaatgacgcaaaatttatccaaccgaatataggtgaacttccaactgccttgaagggtcgactcaatgattcaaataaaatcttggtacagcaaacgctgaatatcctgcaacaactggcagtagccatgggcccaaatattaagcaacatgtaaaaaatttaggcatccctatcatcacagtccttggagacagcaagaacaatgttcgagctgctgccctagcgactgtgaatgcttgggcagaacagactggcatgaaggaatggctggaaggagaagatctttctgaagagctcaaaaaggaaaatcctttcttgaggcaagagcttctgggctggctggctgagaaactacctactcttcgttccacccctacagaccttatcctttgtgttcctcatctctactcctgcctagaagatcgaaatggagatgtgcgaaagaaggcccaagatgccttgccattcttcatgatgcatttaggatatgaaaaaatggccaaggctactgggaaactaaagccaacttctaaagatcaggtattggccatgctagagaaagccaaagttaacatgccagccaagcctgctccacccactaaagcaacttctaaaccaatgggagggtccgctccagccaaattccagcctgcatcagcacctgctgaagattgtatttccagcagtacagaacccaaacctgatccaaaaaaggccaaagctccaggattatcctctaaagcaaagagtgcacaagggaagaagatgccaagcaaaaccagcttaaaggaggatgaagacaaatccgggcctatttttattgttgttccaaatggaaaagagcaaaggatgaaagatgaaaaaggattgaaggtgctaaagtggaattttactaccccacgggatgaatacattgagcaactaaagactcaaatgtctagctgtgtggctaaatggttacaagatgagatgtttcactcagactttcagcatcataacaaagcccttgctgttatggttgatcacttggagagtgaaaaagaaggagttattggttgcctggatcttatcttaaagtggcttaccctgaggttttttgacaccaatacaagcgtcctgatgaaagcactagaatatttaaaattgctcttcaccttgctaagtgaagaagaatatcatcttactgagaatgaagcatcttccttcatcccctatcttgtcgtcaaggttggagaaccaaaggatgtcattcgtaaagatgttcgtgccatcctgaaccggatgtgccttgtctacccagctagcaagatgtttccctttatcatggaaggaaccaaatccaaaaactctaagcagagagcagagtgcctggaagagctgggatgtctggttgagtcctatggcatgaatgtttgccaaccaaccccaggaaaagccttaaaggaaatagctgttcacataggagaccgtgacaatgctgtacgcaatgctgcactcaacaccattgtaacggtgtacaatgtacatggggatcaggtgttcaaactgattggaaatctttctgaaaaggatatgagcatgctcgaggagaggattaagcggtcagcaaagagaccctctgctgcaccaataaaacaggtggaagagaaacctcagcgtgcacagaacataagctccaatgccaacatgttacgcaagggaccagctgaggacatgtcttccaaactcaaccaagcccgaagcatgagtgggcatcctgaggcagcccagatggtccgccgagaattccagctggatctagatgagattgagaatgacaatggtacagtccgatgtgaaatgccagaacttgttcagcacaaactggatgacatttttgagccagtccttattcctgaacccaagatccgggctgtttctccacacttcgatgacatgcacagtaatacagcatccacaatcaatttcattatctcccaagtagccagtggtgacatcaacacaagtatccaagctctgacacagatcgatgaggtcctgagacaggaagacaaagctgaagccatgtccggccatattgatcagtttctgatagccacttttatgcagctaagactcatctacaacacacacatggcagatgagaaattggagaaggacgagatcatcaagttgtatagctgtatcattggcaacatgatttcgctgtttcagatagagagccttgcccgggaggcctccactggagtactaaaagacctaatgcatggcctcatcaccttaatgctggattctcggattgaagatcttgaggaaggacaacaggtcatccgctctgtgaacctcttggtggtgaaggttctggagaagtcagaccagaccaacatcctgagtgccctacttgttttgctccaagacagcctgctagcaacagccagttctcccaaattctcagagcttgttatgaagtgtctctggagaatggttcgactgttgcctgataccatcaatagcattaacctagacagaattcttctggatatccacattttcatgaaggtcttccccaaagagaaactgaagcaatgcaaaagtgaatttcccataaggaccctaaagaccctgctacacaccttatgcaaattaaaagggcccaagatcctggaccacctaacgatgatcgacaacaaaaacgagtctgagctggaggcccatctctgccggatgatgaagcacagtatggaccagactgggagcaagtctgataaggaaacagaaaagggagcatctcgaatagatgaaaaatcatcaaaggccaaagtgaatgatttcttagctgagatttttaagaagattggctctaaagaaaacactaaagagggactagcagagttatatgaatataagaagaaatactcagatgctgacattgaaccatttctgaaaaattcctcacagttcttccagagctatgtcgaaagaggccttcgggtgattgagatggagagggagggcaaaggtcgtatttccacttcaacaggcatctcccctcagatggaagtcacatgtgtgcccacgcccacaagcacagtgtcctccataggtaacacaaatggggaagaagtggggccatctgtctacttggaaaggctaaagatcctccgacagcgatgtggtctggacaacacaaagcaagatgaccgacctcctttgacctctttgctctccaaaccagcagttcctactgtcgcctcttccacagacatgctccacagcaaactctctcagctccgggagtcacgggagcagcaccagcattcagacctggattctaaccagactcactcttcaggaactgtgacctcctcctcctccacagctaacatagacgacttgaaaaaaagactggagagaataaagagcagtcgcaaatga

SEQ ID NO: 331 - DNA, 503 bp, Homo sapiens
taagatgaaagatttgaacattcatcacaaaagaagacataagaatggtcagtaagcacaagaaaatgtatttaacatcattagttaccaggaaagataaatttaagccacagagagagttaaggctctgctaccacggaggccaggccgaaaggccaagtggcgttttggcaggcgggcagcagggtggcactgctggcgagagtgcagatggtccagccactccagaaagcaggctggcagtttttatgaaattaaaaatttgctgccccatgccccagcaacctccctcctcagtgttcacccaggaaaaaggaaaacactcatgcttccacgcaaaccgacacagggactctcaccgcttcagctgtgatctccacagactgggagcttccacgcagaccagcagcaggactctcaccgcttcagctgtgatctccacagactgggaaaacaccaacggccatccaccagggggtggaagagctgcattgtgtccatag

SEQ ID NO: 332 - DNA, 5664 bp, Homo sapiens
atggcggcgcggggccgggggctgctgctgctgacgctgtcggtgctgttggcggcgggcccctccgccgctgcggccaagctcaacatccccaaagtgctgctgcccttcacgcgggccacgcgcgttaacttcacgctggaggcctcggagggctgctaccgctggttgtccacccggccggaggtggccagcatcgagccgctgggcctggacgagcagcagtgctcccagaaggcagtggtgcaggcccgcctgacccagcctgcccgcctcaccagcatcatcttcgcagaggacatcaccacaggccaggtcctgcgctgtgatgccattgtggacctcatccatgacatccagatcgtctccaccacccgcgagctctacctggaggactcccccctggagctgaagatccaggccctggactccgaagggaacaccttcagcactctggctggactggtcttcgagtggacgattgtgaaggactccgaggcggacaggttctcagactcccacaatgcgctgcgaatcctcactttcttggagtctacgtacatccctccttcttacatctcagagatggagaaggctgccaagcaaggggacaccatcctggtgtctgggatgaagaccgggagctccaagctcaaggctcgcatccaggaggctgtctacaagaatgtacgccctgcagaagtcaggctgctgattttggaaaacatccttctgaacccggcctatgacgtctacctgatggtgggaacctccattcactacaaggtgcagaagatcaggcaagggaaaattacagaactctccatgccttccgatcagtacgagttgcagcttcagaacagcatcccgggccccgaaggagacccagcccggccggtggctgtcttggcccaggacacgtcgatggtcactgcactgcagctgggacagagcagcctcgtccttggccacaggagtattcgcatgcaaggtgcttctaggttacccaacagcactatctacgtggtcgaacctggatacctagggttcactgttcaccctggtgacaggtgggtgctggagaccggccgcctgtatgaaatcaccatcgaagtttttgacaagttcagcaacaaggtctatgtatctgacaacatccgaattgaaactgtgcttcctgctgagttcttcgaggtgctctcgtcctcccagaatgggtcataccatcgcatcagggcactaaagaggggacagacggccattgacgcggccctcacctctgtggtggaccaggatggaggggtccacatactacaggtgcctgtgtggaaccagcaggaggtggaaattcacatcccgatcaccctgtatcccagcatcttgacatttccgtggcaaccaaagacgggcgcctatcagtacacaataagggcccacggtggcagtgggaacttcagctggtcttcgtcaagccacctggttgccacagttactgtcaagggcgtgatgaccacaggcagtgacatcgggttcagtgtgatccaggcacatgatgtgcagaacccactccatttcggtgagatgaaggtgtatgtgatcgagccccacagcatggagtttgccccgtgccaggtggaggcacgtgtgggccaggccctggagctgcccctgaggatcagtggcctcatgcccggcggggccagtgaggtggtcaccttgagcgactgctcccactttgacttggctgtcgaggtggagaaccagggtgtgttccagccactcccagggaggctgccgccaggctctgagcactgcagcggcatccgggtaaaggccgaggcccagggctctaccacgcttcttgtgagctacagacacggccacgtccacctgagtgccaagatcaccattgctgcctacctgcccctcaaggctgtggatccctcctctgttgccttggtaaccctgggctcctcaaaggagatgctgtttgaaggaggtcccagaccttggatcctcgagccgtccaaattcttccagaacgtcaccgctgaggacactgacagcatcggcctggctctctttgccccccattcctcccggaattatcagcaacactggatccttgtgacctgtcaggccttgggtgagcaggtcatcgccctgtcggtggggaacaagcccagcctcaccaacccctttcctgcggtggagcctgccgtggtgaagttcgtctgcgccccaccgtccaggctcaccctcgcgcctgtctacaccagcccccagctggacatgtcctgtccgctgctgcagcagaacaagcaggtggtcccagtgtccagccaccgcaacccccggctggacctggctgcttacgaccaggagggccgccggttcgacaacttcagctctctgagcatccagtgggagtccaccaggccagtgttggccagcatcgagcctgagctgcccatgcagctggtgtcccaggacgatgagagtggccaaaagaagctgcacggtttgcaggccattttggttcacgaggcatcaggaaccacagccatcactgccactgccactggctaccaggagtcccacctcagctctgccagaacaaagcagccgcatgaccctctggtgcctctgtcggcctccatagagctcatcctggtggaggacgtgagggtgagcccagaagaggtgaccatctacaaccaccctggcatccaggcagagctccgcatcagggaaggctcaggttacttcttcctcaacaccagcaccgcagatgttgtcaaggtggcctaccaggaggccaggggtgtcgccatggtgcaccctttgctcccgggctcatccaccatcatgatccatgacttgtgcctcgtcttcccggccccagccaaggctgtcgtttacgtgtcggacattcaggagctgtacatccgtgtggttgacaaggtggagattgggaagacagtgaaggcatacgtccgcgtgctggacttgcacaagaagcccttccttgccaaatacttcccctttatggacctgaagctccgagcagcctccccgatcattacattggtggcccttgatgaagcccttgacaactacaccatcacattcctcatccgcggtgtggccatcggccagaccagtctaactgcaagtgtgaccaataaagctggacagagaatcaactcagccccacaacagattgaagtctttcccccgttcaggctgatgcccaggaaggtgacactgcttatcggggccacgatgcaggtcacctccgagggcggcccccagcctcagtccaacatccttttctccatcagcaatgagagcgttgcgctggtgagcgctgctgggctggtacagggcctcgccatcgggaacggcactgtgtctgggctcgtgcaggcagtggatgcagagaccggcaaggtggtcatcatctctcaggacctcgtgcaggtggaggtgctgctgctaagggccgtgaggatccgcgcccccatcatgcggatgaggacgggcacccagatgcccatctatgtcaccggcatcaccaaccaccagaaccctttctcctttggcaatgccgtgccaggcctgaccttccactggtctgtcaccaagcgggacgtcctggacctccgagggcggcaccacgaggcgtcgatccgactcccgtcacagtacaactttgccatgaacgtgctcggccgggtaaaaggccggaccgggctgagggtggtggtcaaggctgtggaccccacatcggggcagctgtatggcctggccagagaactctcggatgagatccaagtccaggtgtttgagaagctgcagctgctcaaccctgaaatagaagcagaacaaatattaatgtcgcccaactcatatataaagctgcagacaaacagggatggtgcagcctctctgagctaccgcgtcctggatggacccgaaaaggttccagttgtgcatgttgatgagaaaggctttctagcatcagggtctatgatcgggacatccaccatcgaagtgattgcacaagagccctttggggccaaccaaaccatcattgttgctgtaaaggtatcccctgtttcctacctgagggtttccatgagccctgtcctgcacacccagaacaaggaggccctggtggccgtgcctttgggaatgaccgtgaccttcactgtccacttccacgacaactctggagatgtcttccatgctcacagttcggtcctcaactttgccactaacagagacgactttgtgcagatcgggaagggccccaccaacaacacctgcgttgtccgcacagtcagcgtgggcctgacactgctccgtgtgtgggacgcagagcacccgggcctctcggacttcatgcccctgcctgtcctacaggccatctccccagagctgtctggggccatggtggtgggggacgtgctctgtctggccactgttctgaccagcctggaaggcctctcaggaacctggagctcctcggccaacagcatcctccacatcgaccccaagacgggtgtggctgtggcccgggccgtgggatccgtgacggtttactatgaggtcgctgggcacctgaggacctacaaggaggtggtggtcagcgtccctcagaggatcatggcccgtcacctccaccccatccagaccagcttccaggaggctacagcctccaaagtgattgttgccgtgggagacagaagctctaacctgagaggcgagtgcacccccacccagagggaagtcatccaggccttgcacccagagaccctcatcagctgccagtcccagttcaagccggccgtctttgatttcccatctcaagatgtgttcaccgtggagccacagtttgacactgctctcggccagtacttctgctcaatcacaatgcacaggctgacggacaagcagcggaagcacctgagcatgaagaagacagctctggtggtcagtgcctccctctccagcagccacttctccacagagcaggtgggggccgaggtgcccttcagcccaggtctcttcgccgaccaggctgaaatccttttgagcaaccactacaccagttccgagatcagggtctttggtgccccggaggttctggagaacttggaggtgaaatccgggtccccggccgtgctggcattcgcaaaggagaagtcttttgggtggcccagcttcatcacatacacggtcggcgtcttggaccccgcggctggcagccaagggcctctgtccactaccctgaccttctccagccccgtgaccaaccaagccattgccatcccagtgacagtggcttttgtggtggatcgccgtgggcccggtccttatggagccagcctcttccagcacttcctggattcctaccaggtcatgttcttcacgctcttcgccctgttggctgggacagcggtcatgatcatagcctaccacactgtctgcacgccccgggatcttgctgtgcctgcagccctcacgcctcgagccagccctggacacagcccccactatttcgctgcctcatcacccacatctcccaatgcattgcctcctgctcgcaaagccagccctccctcagggctgtggagcccagcctatgcctcccactag

SEQ ID NO: 333 - DNA, 1233 bp, Homo sapiens
atgccaggtgtctgtgatagggcccctgacttcctctccccgtctgaagaccaggtgctgaggcctgccttgggcagctcagtggctctgaactgcacggcttgggtagtctctgggccccactgctccctgccttcagtccagtggctgaaagacgggcttccattgggaattgggggccactacagcctccacgagtactcctgggtcaaggccaacctgtcagaggtgcttgtgtccagtgtcctgggggtcaacgtgaccagcactgaagtctatggggccttcacctgctccatccagaacatcagcttctcctccttcactcttcagagagctggccctacaagccacgtggctgcggtgctggcctccctcctggtcctgctggccctgctgctggccgccctgctctatgtcaagtgccgtctcaacgtgctgctctggtaccaggacgcgtatggggaggtggagataaacgacgggaagctctacgacgcctacgtctcctacagcgactgccccgaggaccgcaagttcgtgaacttcatcctaaagccgcagctggagcggcgtcggggctacaagctcttcctggacgaccgcgacctcctgccgcgcgctgagccctccgccgacctcttggtgaacctgagccgctgccgacgcctcatcgtggtgctttcggacgccttcctgagccgggcctggtgcagccacagcttccgggagggcctgtgccggctgctggagctcacccgcagacccatcttcatcaccttcgagggccagaggcgcgaccccgcgcacccggcgctccgcctgctgcgccagcaccgccacctggtgaccttgctgctctggaggcccggctccgtgactccttcctccgatttttggaaagaagtgcagctggcgctgccgcggaaggtgcagtacaggcctgtggaaggagacccccagacgcagctgcaggacgacaaggaccccatgctgattcttcgaggccgagtccctgagggccgggccctggactcagaggtggacccggaccctgagggcgacctgggtgtccgggggcctgtctttggagagccatcagctccaccgcacaccagtggggtctcgctgggagagagccggagcagcgaagtggacgtctcggatctcggctcgcgaaactacagtgcccgcacagacttctactgcctggtgtccaaggatgatatgtag

SEQ ID NO: 334 - DNA, 584 bp, Homo sapiens
cttccagtgcccccggcgcggcgagggggcagcgctccagtattgctgcggcttcgccgacctcaagtactgctgcagcgagccgggcagctacttcccctacaagcacagctacatgtggagcctcaggtcaaacttgtcagtgtcctaatcccagagaaagagcagaagcctaaaggcaagccaggaagataatgaagaaaaagatcattacttttcaatgaccattggtgccttgattggactaggaattgctgcccttgttttactcgcctttgtcatcagtgtctgtgtcctttgctatttatttctgtatacgaaacctcaaagattagacactggccttaagcttcaacacttagaggcttcttccactcaagaaggcaagtcaaatggaaaaaccaaagccctcaattcaaatgcagcatcaaatgcaacaaatgaaacatactatgaagctgatgatataattcaagaaaaaacaatggatgcaacacaaatccacattgcttattaactaaaaattctgtgttttaaatgcttactggagagatgggacaataaaaataaagcgtgcacttgaa

SEQ ID NO: 335 - DNA, 1143 bp, Homo sapiens
ggagctctggaggcggggcttcgagcgtggctcgtgggttttccgtgaagtcgcggtgcagcggtgggcggcatgtctgtggccggtggggagattcgtggggacacggggggagaggacactgctgctcccggccggttcagcttcagcccggagcccacgctcgaggacatccgccgcctccatgctgagtttgctgcggaacgagactgggaacagttccatcagcctcggaatctcctcctggccttggttggggaagtgggggagctggcagaactctttcagtggaaaaccgatggggaacctggcccccaaggctggtcccccagggaacgggcagcccttcaagaggagcttagtgacgtcctcatctacctggtggcattagcagcccgctgccgtgtggatctgccgctagcagtgctctccaaaatggacatcaaccggcgacgctacccagcccatctggcccgcagctcttcccgcaagtatacagaattgccccatggggccatctctgaagaccaggctgtggggcctgcggacattccctgtgactccacaggccagacctcaacctagaaagatggccacaggacttgcaactcagggtggtgtctgaagagcagagagtggcctggccctggagcctttttctagtcttttcagaatagatcatgggcctgaggcctccacttcttgaggtctgaggcccagcagcctctagaaggtagcctcctggtgtttgttctcccagtaaaatggttttgggcgataacttctagattattcctggatggccagggaggctctctgtctcagcaggtgatgacgggggtaccaggggtgcctctgagacccattctcgtgtttccctgttgtaccttttgcctgcagggcagagagatctggtttctagcaaattcccagtaggatgtcatgtaagttccttccccctcttagagattgaaggctgtaagagtccagatggtggagccaggctgtctgggttcaaatgccatctttgacacttgcaagctaaatgacattactcaaattaatcgttctgcacttcagcttccttgtctatcaaataaaaagaatagtacctgcccaaaaaaaaaaaaaaaaaaaaaaaaa

SEQ ID NO: 336 - DNA, 2907 bp, Homo sapiens
atggactctactctaacagcaagtgaaatccggcagcgatttatagatttcttcaagaggaacgagcatacgtatgttcactcgtctgccaccatcccattggatgaccccactttgctctttgccaatgcaggcatgaaccagtttaaacccattttcctgaacacaattgacccatctcaccccatggcaaagctgagcagagctgccaatacccagaagtgcatccgggctgggggcaaacataatgacctggacgatgtgggcaaggatgtctatcatcacaccttcttcgagatgctgggctcttggtcttttggagattactttaaggaattggcatgtaagatggctctggaactcctcacccaagagtttggcattcccattgaaagactttatgttacttactttggcggggatgaagcagctggcttagaagcagatctggaatgcaaacagatctggcaaaatttggggctggatgacaccaaaatcctcccaggcaacatgaaggataacttctgggagatgggtgacacgggcccctgtggtccttgcagtgagatccactacgaccggattggtggtcgggacgccgcacatcttgtcaaccaggacgaccctaatgtgctggagatctggaaccttgtgttcatccagtataacagggaagctgatggcattctgaaacctcttcccaagaaaagcattgacacagggatgggcctggaacgactggtatctgtgctgcagaataagatgtccaactatgacactgacctttttgtcccttactttgaagccattcagaagggcacaggtgcccgaccatacactgggaaagttggtgctgaggatgccgatgggattgacatggcctaccgggtgctggctgaccacgctcggaccatcactgtggcactggctgatggtggccggcctgacaacacagggcgtggatatgtgttgagacggattctccgccgagctgtccgatacgcccatgaaaagctcaatgccagcaggggcttctttgctacgttagtggatgttgtcgtccagtccctgggagatgcatttcctgagctgaagaaggacccagacatggtgaaggacatcattaatgaagaagaggtgcagtttctcaagactctcagcagagggcgtcgcatcctggacaggaaaattcagagcctgggagacagcaagaccattcccggagacactgcttggctcctctatgacacctatgggtttccagtggatctgactggactgattgctgaagagaagggcctggtggtagacatggatggctttgaagaggagaggaaactggcccagctgaaatcacagggcaagggagctggtggggaagacctcattatgctggacatttacgctatcgaagagctccgggcacggggtctggaggtcacagatgattccccaaagtacaattaccatttggactccagtggtagctatgtatttgagaacacagtggctacggtgatggctctgcgcagggagaagatgttcgtggaagaggtgtccacaggccaggagtgtggagtggtgctggacaagacctgtttctatgctgagcaaggaggccagatctatgacgaaggctacctggtgaaggtggatgacagcagtgaagataaaacagagtttacagtgaagaatgctcaggtccgaggagggtatgtgctacacattggaaccatctacggtgacctgaaagtgggggatcaggtctggctgtttattgatgagccccgacgaagacccatcatgagcaaccacacagctacgcacattctgaacttcgccctgcgctcagtgcttggggaagctgaccagaaaggctcattggttgctcctgaccgcctcagatttgactttactgccaagggagccatgtccacccaacagatcaagaaggctgaagagattgctaatgagatgattgaggcagccaaggccgtctatacccaggattgccccctggcagcagcgaaagccatccagggcctacgggctgtgtttgatgagacctatcctgaccctgtgcgagtcgtctccattggggtcccggtgtccgagttgctggatgacccctctgggcctgctggctccctgacttctgttgagttctgtgggggaacgcacctgcggaactcgagtcatgcaggagcttttgtgatcgtgacggaagaagccattgccaagggtatccggaggattgtggctgtcacaggtgccgaggcccagaaggccctcaggaaagcagagagcttgaagaaatgtctctctgtcatggaagccaaagtgaaggctcagactgctccaaacaaggatgtgcagagggagatcgctgaccttggagaggccctggccactgcagtcatcccccagtggcagaaggatgaattgcgggagactctcaaatccctaaagaaggtcatggatgacttggaccgagccagcaaagccgatgtccagaaacgagtgttagagaagacgaagcagttcatcgacagcaaccccaaccagcctcttgtcatcctggagatggagagcggcgcctcagccaaggccctgaatgaagccttgaagctcttcaagatgcactcccctcagacttctgccatgctcttcacggtggacaatgaggctggcaagatcacgtgcctgtgtcaagttccccagaatgcagccaatcggggcttaaaagccagcgagtgggtgcagcaggtgtcaggcttgatggacggtaaaggtggtggcaaggatgtgtctgcacaggccacaggcaagaacgttggctgcctgcaggaggcgctgcagctggccacttccttcgcccagctgcgcctcggggatgtaaagaactga

SEQ ID NO: 337 - DNA, 2205 bp, Homo sapiens
atgtcgtgggaatccggggccgggccaggtctaggttcccaggggatggatctcgtgtggagtgcgtggtacggaaagtgcgttaaagggaaagggtcgttgccactctcggcccacggcatcgtggtcgcctggctcagcagggccgagtgggaccaggtgacggtttatctgttctgtgacgaccataagttgcagcggtacgcgcttaaccgcatcacggtgtggaggagcaggtcaggcaacgaactccctctggcagtggcttctactgctgacctgatacgctgtaagctcttggatgtaactggtggcttgggcactgatgaacttagactgctctatggcatggcattggtcaggtttgtgaatcttatctcagagaggaagacaaagtttgccaaggtccccctcaagtgtctggctcaagaggtaaatattccggattggattgttgaccttcgccatgagttgacccacaagaaaatgccccatataaatgactgccgcagaggctgctactttgtcctggattggctccagaagacctattggtgccgccaactggagaacagcctgagagagacctgggagttggaggagttcagggaagggatagaggaagaggatcaagaggaagataagaacattgttgttgatgacatcacagaacagaaaccagagcctcaggatgatgggaaaagtacggagtcagatgtaaaggccgatggagacagcaaaggcagcgaagaggtggattctcattgcaaaaaggccctgagtcataaagagctatatgaaagagcccgagaactgctggtatcatacgaagaggagcagtttacggtgctggagaaatttaggtatttacctaaggccattaaggcgtggaataacccgtccccacgtgtagaatgtgtcctggcagagctcaagggcgttacatgcgagaacagggaggctgtgctggatgcttttctggatgatggcttccttgtccccacatttgaacagttggcagctttgcagatagaatatgaagatggtcagactgaggtccagagaggggaaggtactgacccaaagtcacacaaaaacgtggacttgaatgacgtcctggtgccaaagccgttctctcagttctggcagcccctgctcaggggcctgcactcccagaacttcacgcaggccctattggagaggatgctctctgaactgccagccttggggatcagcgggatccggcctacctacatcctcagatggaccgttgaactgatcgtggccaacaccaagactggacggaatgctcgccgattttctgcaggccagtgggaagcaagaaggggctggaggctgttcaactgctccgcctcccttgactggccccggatggttgagtcctgcttgggctcaccttgctgggccagcccccaactccttcggatcatcttcaaagccatggggcagggcctgccagacgaggagcaggagaagctgctgcgcatctgttccatttatacccagagtggagaaaacagcctggtgcaggagggctctgaggcctcccccattgggaagtctccatatacactagacagcctgtattggagcgtcaagccagccagctccagcttcgggtctgaagcaaaggcccagcaacaggaggagcagggcagtgttaatgatgtcaaggaagaggagaaggaggagaaagaggtcttgccagaccaggtagaggaggaggaagaaaatgatgaccaagaggaggaagaggaggatgaagatgatgaagatgatgaagaggaagacagaatggaggtggggcctttctctacagggcaagagtcccccactgccgagaatgctaggcttctggcccagaaaagaggagctttgcagggctctgcatggcaggttagctcagaagacgtgcgatgggacacatttcccctaggccgaatgccaggtcagaccgaggacccagcagagctcatgctggagaattatgacaccatgtatcttttggaccagcctgtgctagagcagcggctggaaccctcaacatgcaagactgacaccttgggcctgagctgtggtgtcggcagtggcaactgcagcaacagcagcagcagcaacttcgagggccttctctggagccaggggcagctgcatgggctcaaaactggcctgcagctcttctga

SEQ ID NO: 338 - DNA, 1499 bp, Homo sapiens
ccgcccccgaagcggcgcgggacgcctggcgccgtccgcgatccgcagggctgcccgcttaggcttaggcccggcccgctggcaaagccgagccgcagcattttatttcgttcgtggtttccgcacaggctggagtttcgtgggttgggtcgtacttgggacctcggcgaagaggacccgtttatttttttttctttccaaaatggcagcctccagtcgcgcacaagtgttatctctgtaccgggcgatgctgagagagagcaagcgtttcagcgcctacaattacagaacatatgctgtcaggaggataagagatgccttcagagaaaataaaaatgtaaaggatcctgtagaaattcaaaccctagtgaataaagccaagagagaccttggagtaattcgtcgacaggtccacattggccaactgtattcaactgacaagctgatcattgagaatcgagacatgcccaggacctagcaagccggggaccagccaccagtggcggccagggaccaccttcagcatccactctctgtttgagatgggggctcccaaaaccagcttacaatagccttttgcgctgcctgtcctgtgggagctgataaaccaagtcacatttgcattctgttgcaggcttagtgaaaaaggactgctgtctttccttggttcaagtgttagaatggagagctggagttcgttcagaatagtgctgtgtgttaccacgtctcccctgcaccccattcctaccttgtagctcatgaccattgtgtatagcatttctacactttgtttcttggtccttggcaataaaaagaatgatctccctgagcctttgaccccagataaacccctcccaattaatgcattttcatttcctactgatacaaggcctggagagggctgttgggggccctcagggagggttcaactctgagacgagaactgccttggtgaaggcaagttcaagcaccacttgagactgggggcagcatggagtagggcagggctacggggatacacggtgcaccctgcaacttatacctgagcccagtacaacaaaggtgacgggtgtgtaggtacacacccagagatggagcactgcagatcagcaacctcagccccacctgggaatttgctggaaatgcaggctcaagcccctccccacacctggtgaatgagagagccccagcctgacccaagcccagggcgactcccataccctgaagcctggggcatgctgggcagcaccggtgcccaaatctggctggtggacagaagcacctggagagttggagagctttttaaaaagacatctctcagcacttccctctctgcagattctgactcagtaagtgaggggtgaggcacagtcatttttctctattctgaagctctcccactgttttcaatgtttaaccaactggggacccctgctctttaagtatattacaggtaataaagatattgtttgtatgcttttaaaaaaaaaaaaaaaaaa

SEQ ID NO: 339 - DNA, 4146 bp, Homo sapiens
agtctggacagtcatggcggcgactgtggcgacggcggcagctgtggccccggcgccagcgcccggcacggacagcgcctcttcggtgcactggttccgcaaagggctgcgactccacgacaacccggcgttgctggcggccgtgcgcggggcgcgctgcgtgcgctgcgtttacattctcgacccgtggttcgcggcctcctcctcagtcgggatcaaccgatggaggttcctacttcagtctctggaagatttggacacaagtttaaggaaactgaactcccgcctgtttgtagtccggggacagccagccgacgtgttcccaaggctgttcaaggaatggggagtgacccgcttgacctttgaatatgactctgaaccctttgggaaagaacgggatgcagccatcatgaagatggccaaggaggctggtgtggaagtagtgacggagaattctcataccctctatgacctggacaggatcattgagctgaatgggcagaagccaccccttacatacaagcgctttcaggccatcatcagccgcatggagctgcccaagaagccagtgggcttggtgaccagccagcagatggagagctgcagggccgagatccaggagaaccacgacgagacctacggcgtgccctccctggaggagctggggttccccactgaaggacttggtccagctgtctggcagggaggagagacagaagctctggcccgcctggataagcacttggaacggaaggcctgggttgccaactatgagagaccccgaatgaacgccaactccctcctggccagccccacaggcctcagcccctacctgcgctttggttgtctctcctgccgcctcttctactaccgcctgtgggacctgtataaaaaggtgaagcggaacagcacacctcccctctccctatttgggcaactcctatggcgagagttcttctacacggcagctaccaacaaccccaggtttgaccgcatggaggggaaccccatctgcatccagatcccctgggaccgcaatcctgaggccctggccaagtgggctgagggcaagacaggcttcccttggattgatgccatcatgacccaactgaggcaggagggctggatccaccacctggcccggcatgccgtggcctgcttcctgacccgcggggacctctgggtcagctgggagagcggggtccgggtatttgatgagctgctcctggatgcagatttcagcgtgaacgcaggcagctggatgtggctgtcctgcagtgctttcttccagcagttcttccactgctactgccctgtgggctttggccgtcgcacggaccccagtggggactacatcaggcgatacctgcccaaattgaaagcgttcccctctcgatacatctatgagccctggaatgccccagagtcaattcagaaggcagccaagtgcatcattggtgtggactacccacggcccatcgtcaaccatgccgagaccagccggcttaacattgaacgaatgaagcagatttaccagcagctttcgcgctaccggggactctgtctactggcatctgtcccttcctgtgtggaagacctcagtcaccctgtggcagagcccagctcgagccaggctggcagcatgagcagtgcaggcccaagaccactacccagtggcccagcatcccccaaacgcaagctggaagcagccgaggaaccacctggtgaagaactcagcaaacgggcccgggtggcagagttgccaaccccagagctgccgagcaaggatgcctgagactgcagagcccttgctccgtgagcaaagcctgggtgcccaagcagccaccgcagcagcagagtacaacctgcagagaagctgatcaccgggcagagatagagcgagcatgtgtgtgtgtgtgcgcgtgtgcagaggagggagtggtgtgcctgtttgtgtgtgcatgcatctgttgacactcatgattctgaatgttgcctgggctgggggagtacctgtagcacgccagtgctgtttcccggcctccagacacaaggctcgaggttatggcagtgactttcagctgagacctgttcctgcaagccagctgccttgtctgaacagaacgtagtggtaggaccctagctgggattctggcatctgcctccctagacctccttccctccctcctcacgtcaggctgtggagcaggagcacagcagttctggctgttgtccaaagcatgggattctggaggcagccagagccctgctgagttcctgctttctgacctggaggctgagcaggccggagtggatggatgctgtccagacgtagccacctggcctctgtttcttattttaaaattctctgctactgggctcagtcccaggcccttccttgggcttctgggactgagcatgaggccatagacagatctaaaaagtttccaccaccctacagaagtacacacagatacctgactggtgtggggtatgcctggtactgtaataggagcctaagacagcacacctaccttttcaggatttagaacctaaaattagaaagagaatcccagctgtcattgttccttccccagaagctaagagccagcctcagagcctacccaggagctgtgaaggggcaagggtcaaactgactcactctaccaggaggagaccaggttgcagtggcgtaaggccccctggtttctctggccacactccaaggcaccacagtgctgccagtgaggacagctgacacccagccagggaaaccattctagtctttattctgttggcttccagggcctgtcctggacttgtcagcatccagactgccatgtcagctatcccagtagctgagctccaaggactcaggcagagggactcagggatggggactgccaggggcagttggcaaaagtccaagtagagattacacccagcacaccattccttccaggagcagtaggtgggaggtttgacccagagaagccaatccttgcattccaggagtggcctgtgcctcccacctcttccttcccactgccaaaggcctgtgttgagaaagatgtcatgcaaaaggacgacggtggccaactaaagcaagtcttccttccaccctgtggcctgcacttgagccacaaagtgtgtgtgtgtgtgtgcgtgtgtggtacgtgtgtgtgtgtgtggctatgaggctgattcctgtttggatttttgtcctcacgtgtatcattaagctggcctttgggccttttcctttctacctcccctgtgacctttcctagcctcagatctgttaattcttttggccccagccctgtccctcactgtcctctgtccttggaccagaaccctggggtcagacccatctcctgtagctgtccatcacactgacaggcttcttcctgagatatcctcaggttttctcagccagagagctgcctttagagtccaactgttgtacgtatgtcaccttcactagaaatgtcccatcatcgtgggaggggagcagggcacaggggatggtgtgcattcagagcattgggttgggggcttccctgttccctcagccccagtcgagaggaaagagaatcgggccactgccagaaagagagtcaagcaaacctggaagggcaaatctgagagtgggaaggccaaaggccgaggcccagatttagtattcactagcagcgccttcgggtagcaggatgattccttttcctgcctgtctgctgctggctctcttccctaaggtacaggttggcaggaccacctccgcctacttctccaccatccctagcatgccagcccgttcccagatcaacctgccagtggagtcaggcagtgcactcctggagccaagagggaagggcagggtagagagggtatgtccagtagcctggagctccatggtggcttcatgcctcccttctcccagctcaggtggccctgagggctccctcggaacagtgcctcaaatcctgacccaagggccagcatggggaagagatggttgcaggcaaaatgcactttatagagattttctattgctgggaaggtgtgtttctcccacaatttgtttgtgaatattcacttgttttataaatgtctgacctgtcttgaggaaaaaaaaaaaaaaaa

SEQ ID NO: 340 - DNA, 393 bp, Homo sapiens
gagactctgtctaaaaaaaaaaaaaaaattacagaagagcacaggtgctattggaggggagggatacagatggattccatggggaaaatatttattataggaataaaaataatgttaaatttgcaaagactccaatgagtctcttttaacctcagccaggctgttttaaacagtgtcatgaatttctgggaacctggttctagtcttttcagattctgtcgtatttgccaaaagtttctttcaacatactctcagtgtttttgtatgttcaatggtgacctgtagctgcaactccttttattgtcagagaatgccaaaagctatttttaaaataaaggtatatattttctcaaaaaaaaaaaaaaaaaaaaaaaaaaaaaaaagcctacagcc

SEQ ID NO: 341 - DNA, 6054 bp, Homo sapiens
atgagcttggggctggcgagggcacaggaggtggagctgacactagagacggttatccagacactggagagcagcgtcctgtgccaggagaaaggcttgggcgcgcgggacctggcccaggacgctcagatcaccagcctgcctgcccttatcagggagattgtcacccgcaacctctcccagcctgagagcccagtcctgctgccggccacagagatggcatcgctgctgtcgctgcaggaggagaaccagctgctgcagcaggagctgtcccgcgtggaggacctgctggcccagagccgtgccgagcgcgatgagctcgccattaagtacaatgcggtcagcgagaggctggagcaggctctgcggctggagcctggggagctggagacgcaggagcccagggggctggtacggcagagcgtggagttgcggaggcagctgcaggaggagcaggcctcctaccggcgcaagctgcaggcctaccaggagggccagcagcggcaggcccagcttgtgcagcggctgcagggcaagattctccagtacaagaagaggtgctcggagctggagcagcagctgctggagagatccggagagctggagcagcagcggctgagggacacagagcacagccaagacctggaaagcgccctcatccggctggaggaggagcagcagaggagtgccagcctggcccaggtgaatgccatgctccgagaacagctggaccaggcaggctcggccaaccaggctctgagtgaggacatacgaaaggtgaccaatgactggacacgctgccgcaaggagctggagcaccgggaggcggcgtggaggcgcgaggaggagtccttcaacgcctacttcagcaacgagcacagtcgcctgctcctcctctggaggcaggtggtggggttccggcggctggtcagcgaggtgaagatgttcactgagagggacctgctgcagctgggaggggagctggcccggacatcacgagctgtccaggaggcgggcctgggactgagcacgggcctacggctggcagagagccgggccgaggcagccctggagaaacaggccctgctgcaggcccagctggaggagcagctgcgggacaaggtgctccgcgagaaggacctggcgcagcagcagatgcaaagcgacctggacaaggctgacctcagtgccagagtgacagagctgggcctggcagtgaagcgtcttgagaagcagaatctggagaaggatcaggtcaacaaggacctcactgagaagcttgaggccctggaatccctgcggctacaggagcaggcggccctggagacagaggatggagaggggctacagcagaccctaagggacctggcacaggccgtcttgtcagactctgagagcggcgtccagctgagcggctctgagcgcaccgcggatgcttccaacggcagcctgcgggggctctcgggccagcggaccccgtccccaccgcggcgctcctcgcccggccgaggccgttcaccccgccgaggcccctccccggcctgctcagactcctccacgctcgccctgatccactccgccctgcacaagcgccagctgcaggtccaggacatgcgtgggcgctatgaggcaagccaggacctactgggcaccctgcggaagcagcttagcgacagcgagagcgagcggcgggccctagaggaacagctgcagcgcctgcgggacaagaccgacggcgccatgcaggcccacgaggacgcccagcgcgaggtgcagcggctgcggagcgccaacgagctcctgagcagggagaagagcaacctggcccacagcctgcaggtggcccagcagcaggccgaggagctgcggcaggagcgggagaagctgcaggctgcccaggaggagctgcggcgccagcgggaccggctggaggaagagcaggaggacgcagtgcaggatggcgcgcgggtgcgccgggagcttgagcgcagccatagacaactagagcagctggaagggaagcgctcagtcctggccaaggagctggtggaggtgagggaggcgctgagccgcgccacactgcaacgggacatgctgcaggccgagaaggccgaggtggccgaggcgctgaccaaggctgaggctggccgcgtggagctcgagctctccatgaccaagctgagggcagaggaggcctccctgcaggactccctgtccaagctgagcgccctcaacgagagccttgctcaggacaagttggatctgaaccgccttgtcgcccagctggaggaagaaaagtccgccctgcagggccggcaacggcaggcagagcaggaggccacagtggcgcgggaagagcaggaacggctagaggagctgcggttggagcaggaggtggcgcggcagggcctggagggctccctacgagtggcggagcaggcccaggaggcattggagcagcagctccccacgctgcgccatgagcgcagccagctgcaggagcagctagcgcagctctcccggcagctgagcgggcgggagcaggagctggagcaggcccggcgggaggcccagcggcaagtggaggcgctggagcgagcggcccgtgagaaggaggcgctagccaaggagcacgctggcctggctgtgcagctggtggctgcggagcgtgaaggcaggaccctgtcagaggaggccacacgcctgcgcttggagaaggaagccctggagggcagcctgtttgaggtgcaacggcagctggcccagcttgaggcccgccgggagcagctggaagccgaggggcaggccctgctgctggccaaggagaccctgactggggagttggcgggcctgcggcagcaaataatagctacacaggagaaagccagtctagacaaggagctgatggcccagaagctggtgcaggctgagcgggaggcccaggcctctctgcgggagcagcgggcagctcacgaggaggacttacagcgactccagcgtgaaaaggaggcagcatggcgggagctggaggccgagcgggcccagctgcagagtcagctgcagcgtgagcaggaggagctgctggcccggctggaggctgagaaggaagagctgagtgaggagattgctgccctgcagcaggagcgcgacgagggcctcctcctagcagagagtgagaagcagcaggccttgtctctgaaggagtctgagaagacggcgctgtcagagaagttgatgggtacacggcacagcctggccaccatctccctggagatggagcggcagaaacgagatgcccagagccggcaggagcaggaccggagcaccgtgaacgctctgacgtctgagctgcgggacctacgggcccagcgggaggaggctgctgcggcccacgcccaggaggtgaggaggctgcaagagcaggcccgagacctgggcaagcagcgggactcctgtcttcgcgaggcagaagagcttcggacccagctgcgtctgctggaggatgcccgtgacgggctgcggcgggagctgctggaggcccagcgcaagctgcgtgagagccaggagggccgggaggtgcagcgccaggaggcaggcgagctgcgacgcagcctgggcgagggtgccaaggagcgcgaggccctgcggcgttccaatgaggagcttcggtctgctgtgaagaaggcagagagcgagcgcatcagcctgaagcttgccaatgaggacaaggagcagaagctggcactcctagaggaggcacggacagctgtgggcaaggaggccggggagctgcgaactgggctgcaggaggtggagcgctcacggctggaggctcggcgggagctgcaggagctccggcgtcagatgaagatgctggacagtgagaacaccagactgggccgggagctggcggagctgcagggccgcctggcgctgggcgagcgggcagagaaggagagcaggcgggagaccctgggcctccggcagaggctgctgaagggcgaggccagcctggaggtgatgcggcaggagctccaggtagcccagcggaagctgcaggaacaagaaggcgagttccggacccgcgagcgacgcctgctgggctccctggaggaggcgcgtggcactgaaaagcagcagctggaccacgcccgcggcctggagctgaagctggaggcggcgcgggccgaggctgcagagctgggcctgcggctgagcgcagccgagggccgggcacaaggcctggaggccgagctggcccgcgtggaggtgcagcggcgcgcggcggaggcccagctgggtggcctgcgctcggctctgcgccggggcctcggcctcggtcgcgcgcccagcccagccccgcggccagtgcccggttcccctgcccgggacgcacccgcagaaggaagcggggaagggctcaacagccccagcaccttagaatgcagccctgggtcccagccaccatctccaggacctgccacctccccagcctctccagacctggacccggaggcagtgcgcggggccctccgggaattcctgcaagagctgcggagtgcccagagagaacgggacgaacttcggacccagaccagtgccctgaatcgccagctggccgagatggaggctgagagggacagcgcaacctcgagggccaggcagctgcagaaggcggtggctgagagtgaggaagcccggcgcagtgtggatgggcggctgagcggggtccaggcggagctggcgctgcaggaggagagtgtgcggcgcagtgagcgggagcgccgggccacgctggaccaggtggccacactggagaggagcctgcaggccaccgagagcgagctccgggccagccaggagaagatcagcaagatgaaggccaatgagacaaagctggagggcgacaagcggcgcctgaaggaggttctggacgcctccgagagccgcactgtcaagctggagctgcagcggcgctcgcttgagggggagctgcagcgcagccgcctgggcctcagtgaccgcgaggcccaagcccaggccctccaggatcgggtggattccctgcagagacaggtggccgacagcgaggtgaaggcagggaccctgcagctgaccgtggagcggctgaatggggccctggctaaggtggaggaaagcgagggggccctgcgggacaaggtgcggggcctgacagaggccctggcccagagcagtgccagcctcaacagcacccgggacaagaacctgcatctgcagaaggctctgaccgcctgtgaacatgaccgccaagtactccaggaacggctggatgccgcccggcaggcattatctgaggcacggaagcagagcagctccctgggcgagcaggtgcagacgttgcgaggcgaggtggctgacctggaactgcagcgggtggaggccgagggccagctacaacagctacgggaggtgctgcggcagcggcaggagggtgaggctgcagccctgaacaccgtccagaagctgcaagacgagcggcggctgctgcaggagcgcctgggaagcctgcagcgcgccctggctcagctggaagctgagaagcgggaggtggagcgctcagccctgcggctggagaaggaccgtgtagccctcaggaggacgctggacaaggtggagcgggagaagcttcgtagccatgaggacacagtgcggctgagcgcagagaagggccgcctggaccgcaccctcacgggggctgagctggagctggcagaggcgcagaggcagatccagcagctggaggcgcaggtggtggtgctggagcagagccacagcccggcccagctggaggtggatgcgcagcagcagcagctggagctgcagcaggaggtggagcggctgcgcagcgcccaggcgcagactgagcgcaccctggaggctcgggagcgggcccaccgccagagggtgcgtgggctggaggagcaggtgtccacactgaagggccagctgcagcaggagcttcgaaggagctcagcacccttctccccaccctccggccccccagagaaatga

SEQ ID NO: 342 - DNA, 1017 bp, Homo sapiens
atggccaagtggggtgagggagacccacgctggatcgtggaggagcgggcggacgccaccaacgtcaacaactggcactggacggagagagatgcttcaaattggtccacggataagctgaaaacactgttcctggcagtgcaggttcaaaatgaagaaggcaagtgtgaggtgacggaagtgagtaagcttgatggagaggcatccattaacaatcgcaaagggaaacttatcttcttttatgaatggagcgtcaaactaaactggacaggtacttctaagtcaggagtacaatacaaaggacatgtggagatccccaatttgtctgatgaaaacagcgtggatgaagtggagattagtgtgagccttgccaaagatgagcctgacacaaatctcgtggccttaatgaaggaagaaggggtgaaacttctaagagaagcaatgggaatttacatcagcaccctcaaaacagagttcacccagggcatgatcttacctacaatgaatggagagtcagtagacccagtggggcagccagcactgaaaactgaggagcgcaaggctaagcctgctccttcaaaaacccaggccagacctgttggagtcaaaatccccacttgtaagatcactcttaaggaaaccttcctgacgtcaccagaggagctctatagagtgtttaccacccaagagctggtgcaggcctttacccatgctcctgcaacattagaagcagacagaggtggaaagttccacatggtagatggcaacgtctctggggaatttactgatctggtccctgagaaacatattgtgatgaagtggaggtttaaatcttggccagagggacactttgccaccatcaccttgaccttcatcgacaagaacggagagactgagctgtgcatggaaggtcgaggcatccctgctcctgaggaagagcggacgcgacagggctggcagcggtactactttgagggcattaaacagacctttggctatggcgcacgcttattttag

SEQ ID NO: 343 - DNA, 690 bp, Homo sapiens
atggcggccctgggacatcttgctggggaggcagcggcggccccaggcccgggtactccctgcgcgtcccgcggagcccggcttcccggcccagtttccagcgcccggaatccttccactgtctgtctctgcccagagcaacctacgtgcagtaacgctgactccagagcgcacccgttgggcgatgaaggcggcacagcgtcgaaaaaacaaaagaataagaagaaaacgcggaacagggcctctgtggcaaatggaggcgagaaggcctcagagaaactcgccccagaagaagttcccctaagcgctgaggcccaggcacaacagttggcccaggaattggcttggtgtgtggagcaactggagctgggcctcaagaggcagaaacccaccccgaaacagaaagagcaggctattggagcaatccgaaccctgcgcagcaaaagaacgcccttgccccggaagaggcagctgatgcactccttgtttggagactatagggctcagatggaagccgaatggcgtgaggccctgcgggctctcagagctgctgcttattcagcccaggtgcaacctgtagatggagccaccagaaagaagagccaaagggtctgcaggcctcgctctatatggagagccaaagccactctggacatgcctgatgaagagtttaggttcaatttcttttag

SEQ ID NO: 344 - DNA, 804 bp, Homo sapiens
atggcggcgcccgttgtcacggccccgggcagagctctgctgcgggcgggcgctggacggctgcttcggggaggcgtccaggagctactgcggccgcgacatgaagggaacgcccctgacctggcctgcaacttcagcctttctcaaaatcggggcacggtcatcgtggagcgctggtggaaggtaccgctggccggggagggccggaagccgcgcctgcaccggcgacatcgcgtctataagctggtggaggacacgaagcatcggcccaaagaaaacctggagctcatcctgacgcagtcggtggagaatgttggagtccggggtgacctggtctcagtgaagaaatctttaggccggaatcgactccttcctcagggactggctgtatatgcatcccctgaaaacaagaagctgtttgaagaggagaaattgctgagacaagaaggaaaattagagaagatccagaccaaggcaggtgaggcgacagtgaaatttctaaaaagctgtcgcctggaggtagggatgaagaacaatgtcaaatgggagctgaaccctgaaatagttgcccgccacttctttaagaatcttggtgttgtggttgccccacatacattaaagttaccagaagagcctatcacacggtggggcgagtattggtgtgaggtgacggtaaatgggcttgatactgtgagagtgcctatgtctgtcgtgaactttgagaagcccaagaccaaaagatataagtactggttagcccagcaagctgccaaggctatggcccccaccagcccccagatctaa

SEQ ID NO: 345 - DNA, 2136 bp, Homo sapiens
atgatggcggatgccaagtatgtcctctgccgatgggaaaagcgattatggcctgcgaaggttttggcccgaaccgcgacttcaacaaaaaataagagaagaaaggaatattttctagctgtgcaaatcctctctctagaggaaaaaattaaggtgaaaagcactgaagttgagatcctagagaagtctcaaattgaagccattgcttcctcgttagcctcacagaatgaggttcctgcggcacccctggaagaactggcctacagacggtcgcttcgcgtggctctggacgttctgagcgagggctcgatttggagtcaagaaagctctgcagggacaggtagagctgaccggtctctgcgagggaagcccatggagcatgtctcctcgccctgtgattcgaactcctcatctcttccccgcggagacgtgttgggcagttccagacctcacaggaggaggccatgtgtgcaacaaagcctgtcaagttcgttcacttgtgaaaaggaccccgagtgcaaagtggaccacaagaaggggctcaggaaaagtgaaaacccaagaggcccgttggtcctcccagctggaggtggtgcccaagatgagagtgggtccagaatccaccacaaaaattggactcttgcaagtaagaggggaggaaactcagcgcagaaggctagcttgtgcctgaatggatcttccctttcagaggacgacacggagagagacatggggagcaaaggaggcagctgggcagccccgtccttgccctccggggtcagggaggacgatccctgtgccaacgctgagggacacgaccccggtctgccgttgggcagcctcactgcgcccccagcccctgagccctcggcctgctcagagcctggagaatgccctgcgaaaaagaggccgcgcctggatggcagccaaaggccgcctgccgtgcagctggagcccatggcagcaggggccgcaccatcccccgggccggggccagggcccagagagtctgtgaccccgcgcagcaccgccaggctgggcccgcctccctcccacgcctctgcggatgcaaccagatgtcttccttgcccggattcccagaagctggagaaagagtgccagtcttccgaagagtccatggggtctaattccatgcgttctatcctggaggaagacgaggaagacgaggagccaccaagagtccttttataccacgaaccacgttcgtttgaagtaggaatgctagtctggcataaacataaaaaataccccttctggccagcagtggtcaaaagcgtcaggcagagagataagaaagcaagtgtgctatacatcgaaggacacatgaacccgaaaatgaaaggtttcacagtgtctcttaaaagtttaaagcactttgattgtaaagagaaacagacgcttctgaatcaagccagggaggacttcaaccaggacatcggctggtgtgtctccctcatcaccgactacagggtccggttaggctgcgggtcttttgctggctctttcctggaatattacgcggctgatataagctatcctgtccgaaaatccatccagcaggacgtcttggggaccaagcttcctcaactgagcaaggggagccccgaggagcccgtggtggggtgccccctggggcagaggcagccctgccggaaaatgctccccgaccgctcgcgggccgcccgggaccgggccaaccagaagctggtggagtacattgtgaaggccaagggcgcggagagccacctgcgggccatcctaaagagcaggaagccatctcgctggctgcagaccttcctgagctccagccagtacgtgacctgtgtggagacctacctggaggatgaggggcagctggacctggtggtgaagtacctgcagggcgtctaccaggaggtgggggccaaggtgctccagcgcaccaacggcgaccggatccggttcattctggacgtgcttctgcccgaggccatcatctgtgcgatctctgcggtggacgaggtggactacaagacggctgaggagaagtacatcaaggggccttcgctgagctaccgggaaaaagaaatatttgacaaccagctccttgaagagcggaaccggcgccgtcggtga

SEQ ID NO: 346 - DNA, 488 bp, Homo sapiens
gcacgagggaagctctaggaggagcaagatggtattttctagtctctgcactggtgacatttggagcaagtcagttggagaaaaccaggtggagatgttggacttggatggattctgtggctcatgcacaggagaggcccagcctttggcctccctccaagtgttttcccaggtgggcggcctgccaggctgtgtgcatgacagtctgacccctcaggttgtttataaggttcttcagggcagaggttccttgaggaccagtggtcaaggacttgggttccagccccagctctaccgctcaccagctgtgtgcctctccgaatcgaagcgtctttatgtctaaaatggaagccactacacttccctcccagaggaggcataagagacctatgcctgtgtaacgtgaccggtgcctggcatgtaatacattctcaataaatggtgactatgattcgctgcaagaaacgatgaaaagggctctctcagac

SEQ ID NO: 347 - DNA, 443 bp, Homo sapiens
ttttttttttttttgttttttactaaactcagtttttattttgagttaccattctgccaagtgccagaaaacctaatctggttaatctctgctaattggatgacgtcaacattttcctcctcattttcggtcaattcatagacactttggggccccatttctctcccatgctctgtggcaaggacctgcttggttctgtacactccttctccccgggatagagtctggctctggtagcagtctcatggttgttgttcgttttccaggctctggagtcacaattgacccgtgaattcctcaccctttgttcctcctaatgatggattcttctgctccacttgtccatccaatgttggacccttgggaattcccagatgtcagatcccagcagagtcccgatcctctcaccccatctacaatgggtgggcaccagtgaatcaaca

SEQ ID NO: 348 - DNA, 3663 bp, Homo sapiens
gtggcactcacggaatctcgggtcttctgacgtgccgggcgggaagatgtcatcattgccaagaagagcgaaagtacaggtccaggatgtggtactgaaagatgaattttcttcattctctgagttatcatctgcctctgaagaagatgacaaggaagatagtgcctgggagccccaaaagaaagttcccagaagccgtaaacagccccctcccaaggaatccaaaccaaagaggatgcctcgggtgaagaagaatgccccacagatcagtgatggctcagaagtcgttgttgttaaggaggagctgaatagctctgtggctattgctgatactgctttagaagacagaaaaaataaattggatactgtacagactctgaaaacagccaagacaaaacagaaatgtgcagcgcagccacatacagttcgaaggactaaaaagctgaaagttgaagaagaaaccagcaaagccagcaacttagagggtgagagtaatagttcagagacaccatccacaagcactgtgtggggaggtacatgcaagaaggaagagaatgacgatgactttacatttggtcagtccgctttaaagaaaatcaagactgagacatatcctcaggggcagcctgtcaagtttccagcaaatgccaatagtactaaagaggaggtggaaatgaattgggacatggtacaggttttatctgagagaactaatattgaaccttgggtttgtgccaacatcattcgtctctttaatgatgataacacaattcccttcattatacgttatagaaaagagctcattaataaccttgatgctgattccttgagagaagttcagcaaaccctagaagagctacgggctgttgcaaagaaagttcatagtacaatccagaaaattaagaaggaagggaagatgtctgagtgcttgttaaaagccatgctgaattgtaaaacttttgaagaactagaacacgtgtctgctccatataaaactggaagcaaagggactaaagcccagagagcaagacagttgggcttagaaggagcagccagggcactgcttgagaaaccaggggagctcagtctgctatcgtacattaggcctgacgttaaagggctttcaacgcttcaggatattgaaataggagtgcagcatattttagcagatatgattgctaaagacaaagacacgcttgacttcattcggaacttgtgccagaagagacatgtttgtatccagtcatctctggcaaaagtatcctcaaaaaaggtaaatgagaaagatgttgataagtttctgctctaccagcatttttcctgcaacataagaaacattcaccatcatcagattctggcaattaaccgtggagaaaatttgaaggtactgacggttaaggtcaatatttctgatggagtgaaggatgaattctgtaggtggtgcatccaaaacaggtggagaccacgtagctttgcaaggccagagttaatgaagatcttatataattcactgaatgattcctttaaacgccttatttatcctcttctctgtagagaattcagagccaaactaacatcagatgcagagaaggaatcagtaatgatgtttggacggaaccttcgtcagctccttttaacaagccctgttccagggcgcaccttaatgggagtggatcctggttataaacatggttgcaaattagctataatttctcctactagtcagatacttcatactgatgtggtttacttgcattgtggacaaggcttccgagaggcggagaaaataaagacacttttgctgaatttcaactgcagcacagtagtgattggaaatggaactgcctgcagggaaacagaagcttactttgctgacctgataatgaagaattattttgcaccactggatgttgtttactgtatcgtcagtgaagcaggagcatcaatctacagtgtcggccctgaagctaacaaagagatgccagggctggaccctaatttgagaagtgcagtttccatagcaaggcgtgtacaagatccattagctgagctagtgaaaattgagccaaagcacattggagttggaatgtatcagcatgacgtatcccagactttactcaaggcaacactggacagtgttgtagaagaatgtgtcagctttgtgggagtggatattaacatctgttcagaagttttgttaaggcatattgcaggactcaatgccaacagggccaaaaatattattgaatggcgagagaaaaatggaccctttatcaaccgagaacagctgaagaaagtgaaagggctgggcccaaaatccttccaacagtgtgctggcttcatcagaatcaaccaggattatatccgaacgttttgcagtcagcaaactgaaacttcaggccaaattcaaggagttgctgtgacatcttcagcagacgttgaggtcacaaatgagaagcagggcaaaaagaagagcaaaactgcagtgaatgttttactgaagccaaatcctttggaccaaacttgtattcatccagaatcatatgacatagcaatgaggtttttgtcatccattggagggacactgtatgaggttggaaagcctgaaatgcaacaaaaaataaattcattccttgaaaaggaaggaatggagaaaattgcagaaagattgcaaacaacagtacacaccttacaggtcatcatagatggtctcagccagcctgaaagctttgactttcgaacagattttgataaacctgatttcaagagaagcatagtatgcctggaagatctgcagattgggacagttcttacaggcaaagttgagaatgccactctctttggaatttttgtggatataggagtggggaaatctgggctgattcccatacgaaatgtaacagaagcaaaactttcaaaaacaaagaagagaagaagccttggactgggccccggagaaagagtggaagtccaagtactcaacattgacatcccccgatctaggattactctggacctcattcgggtgttatgagtatcccacgaaggccagacgctgattttattttctcatttccacagattgacaaggataagtcagttgtttgtaaactctaggtagcagatgagaaataattcacttaatatcagaaatattttccaaacactttcctttattttttcttctgaataaatagaaaaccaacagtttgatttccttttcccttaaaggaaacaactaatacacattcttatatggctttatgtagtaatagttttctgactaaaattttgttttttattttttgtaatttatctttaactccttttgcattttgtataacagattgcttaacttctacttgccaacatctgccttgctggacttgtatgggattgtctccttgatttgaattgtaccgtctttgttgacacagtagggctgggcagtgtttaatccttccattttatagatttttttttaatcaggccttttggactttattcataattttgcaataatctcttttcccttgtcatgcaagccaaaaatataccagtaaaacagattctgacgtgtttgtagttatcaaatgaatggctcgaaacacttctcaaaaggatatacgtattgaccccaacaataaatgtttgtggctagtg

SEQ ID NO: 349 - DNA, 1164 bp, Homo sapiens
atggaacaacctgggcaggatcccacctcagacgacgtcatggactcgttcctggaaaagttccagagccagccttaccgtggcggctttcatgaggaccagtgggagaaggaatttgaaaaggtccccctatttatgtcgagagcgccatcagaaattgatcccagggagaatcctgacttggcttgtctccagtcaattatttttgatgaggagcgttctccagaagaacaggccaagacctataaagatgagggcaatgattactttaaagaaaaagactacaagaaagctgtaatttcatacactgaaggcttaaagaagaaatgtgcagatcctgatttgaatgctgtcctttataccaaccgggcagcagcacagtactatctgggcaattttcgttctgctctcaatgatgtgacagctgccagaaagctaaaaccctgccacctcaaagcaataataagaggtgccttatgccatctggaactgaaacactttgccgaggccgtgaactggtgtgatgagggactgcaaatagatgccaaagagaagaagcttctggaaatgagggctaaagcagacaagctgaagcgaattgaacagagggatgtgaggaaagccaacttgaaagaaaagaaggagaggaatcagaatgaggctttactccaggccatcaaggctaggaatatcaggctctcagaagctgcctgtgaggatgaagattcagcctcagaaggtctaggtgagcttttcctggatggactcagcactgagaacccccatggagccaggctgagtctagatggccagggcaggctgagctggcctgtgctctttctgtacccagagtatgcccagtcggacttcatctctgcttttcatgaggactccaggtttattgatcatctaatggtgatgtttggtgaaacaccctcttgggacctagagcaaaaatattgccctgataatttggaggtctactttgaggatgaggacagggcagaactataccgggtgcctgccaagagcaccttgctacaggttctacagcaccagaggtactttgtaaaagccctgacaccagcatttttggtctgtgtaggatcctctcctttttgcaagaattttctccgggggagaaaggtgtaccagatacgatga

SEQ ID NO: 350 - DNA, 3996 bp, Homo sapiens
atgcaggcggctccgcgcgccggctgcggggcagcgctcctgctgtggattgtcagcagctgcctctgcagagcctggacggctccctccacgtcccaaaaatgtgatgagccacttgtctctggactcccccatgtggctttcagcagctcctcctccatctctggtagctattctcccggctatgccaagataaacaagagaggaggtgctgggggatggtctccatcagacagcgaccattatcaatggcttcaggttgactttggcaatcggaagcagatcagtgccattgcaacccaaggaaggtatagcagctcagattgggtgacccaataccggatgctctacagcgacacagggagaaactggaaaccctatcatcaagatgggaatatctgggcatttcccggaaacattaactctgacggtgtggtccggcacgaattacagcatccgattattgcccgctatgtgcgcatagtgcctctggattggaatggagaaggtcgcattggactcagaattgaagtttatggctgttcttactgggctgatgttatcaactttgatggccatgttgtattaccatatagattcagaaacaagaagatgaaaacactgaaagatgtcattgccttgaactttaagacgtctgaaagtgaaggagtaatcctgcacggagaaggacagcaaggagattacattaccttggaactgaaaaaagccaagctggtcctcagtttaaacttaggaagcaaccagcttggccccatatatggccacacatcagtgatgacaggaagtttgctggatgaccaccactggcactctgtggtcattgagcgccaggggcggagcattaacctcactctggacaggagcatgcagcacttccgtaccaatggagagtttgactacctggacttggactatgagataacctttggaggcatccctttctctggcaagcccagctccagcagtagaaagaatttcaaaggctgcatggaaagcatcaactacaatggcgtcaacattactgatcttgccagaaggaagaaattagagccctcaaatgtgggaaatttgagcttttcttgtgtggaaccctatacggtgcctgtctttttcaacgctacaagttacctggaggtgcccggacggcttaaccaggacctgttctcagtcagtttccagtttaggacatggaaccccaatggtctcctggtcttcagtcactttgcggataatttgggcaatgtggagattgacctcactgaaagcaaagtgggtgttcacatcaacatcacacagaccaagatgagccaaatcgatatttcctcaggttctgggttgaatgatggacagtggcacgaggttcgcttcctagccaaggaaaattttgctattctcaccatcgatggagatgaagcatcagcagttcgaactaatagtccccttcaagttaaaactggcgagaagtacttttttggaggttttctgaaccagatgaataactcaagtcactctgtccttcagccttcattccaaggatgcatgcagctcattcaagtggacgatcaacttgtaaatttatacgaagtggcacaaaggaagccgggaagtttcgcgaatgtcagcattgacatgtgtgcgatcatagacagatgtgtgcccaatcactgtgagcatggtggaaagtgctcgcaaacatgggacagcttcaaatgcacttgtgatgagacaggatacagtggggccacctgccacaactctatctacgagccttcctgtgaagcctacaaacacctaggacagacatcaaattattactggatagatcctgatggcagcggacctctggggcctctgaaagtttactgcaacatgacagaggacaaagtgtggaccatagtgtctcatgacttgcagatgcagacgcctgtggtcggctacaacccagaaaaatactcagtgacacagctcgtttacagcgcctccatggaccagataagtgccatcactgacagtgccgagtactgcgagcagtatgtctcctatttctgcaagatgtcaagattgttgaacaccccagatggaagcccttacacttggtgggttggcaaagccaacgagaagcactactactggggaggctctgggcctggaatccagaaatgtgcctgcggcatcgaacgcaactgcacagatcccaagtactactgtaactgcgacgcggactacaagcaatggaggaaggatgctggtttcttatcatacaaagatcacctgccagtgagccaagtggtggttggagatactgaccgtcaaggctcagaagccaaattgagcgtaggtcctctgcgctgccaaggagacaggaattattggaatgccgcctctttcccaaacccatcctcctacctgcacttctctactttccaaggggaaactagcgctgacatttctttctacttcaaaacattaaccccctggggagtgtttcttgaaaatatgggaaaggaagatttcatcaagctggagctgaagtctgccacagaagtgtccttttcatttgatgtgggaaatgggccagtagagattgtagtgaggtcaccaacccctctcaacgatgaccagtggcaccgggtcactgcagagaggaatgtcaagcaggccagcctacaggtggaccggctaccgcagcagatccgcaaggccccaacagaaggccacacccgcctggagctctacagccagttatttgtgggtggtgctgggggccagcagggcttcctgggctgcatccgctccttgaggatgaatggggtgacacttgacctggaggaaagagcaaaggtcacatctgggttcatatccggatgctcgggccattgcaccagctatggaacaaactgtgaaaatggaggcaaatgcctagagagataccacggttactcctgcgattgctctaatactgcatatgatggaacattttgcaacaaagatgttggtgcattttttgaagaagggatgtggctacgatataactttcaggcaccagcaacaaatgccagagactccagcagcagagtagacaacgctcccgaccagcagaactcccacccggacctggcacaggaggagatccgcttcagcttcagcaccaccaaggcgccctgcattctcctctacatcagctccttcaccacagacttcttggcagtcctcgtcaaacccactggaagcttacagattcgatacaacctgggtggcacccgagagccatacaatattgacgtagaccacaggaacatggccaatggacagccccacagtgtcaacatcacccgccacgagaagaccatctttctcaagctcgatcattatccttctgtgagttaccatctgccaagttcatccgacaccctcttcaattctcccaagtcgctctttctgggaaaagttatagaaacagggaaaattgaccaagagattcacaaatacaacaccccaggattcactggttgcctctccagagtccagttcaaccagatcgcccctctcaaggccgccttgaggcagacaaacgcctcggctcacgtccacatccagggcgagctggtggagtccaactgcggggcctcgccgctgaccctctcccccatgtcgtccgccaccgacccctggcacctggatcacctggattcagccagtgcggattttccatataatccaggacaaggccaagctataagaaatggagtcaacagaaactcggctatcattggaggcgtcattgctgtggtgattttcaccatcctgtgcaccctggtcttcctgatccggtacatgttccgccacaagggcacctaccataccaacgaagcaaagggggcggagtcggcagagagcgcggacgccgccatcatgaacaacgaccccaacttcacagagaccattgatgaaagcaaaaaggaatggctcatttga

SEQ ID NO: 351 - DNA, 2534 bp, Homo sapiens
gcagaggtgagtgccgggctcggcgctctgctcctggagctcccgcgggactgcctggggacagggactgctgtggcgctcggccctccactgcggacctctcctgagtgggtgcgccgagtcatggagggcgcagagctggccgggaagatcctttccacctggctgacgctggttctcggcttcatccttttaccttcggtcttcggagtgtctctgggcatctccgagatctacatgaagatcctagtgaaaactttagagtgggccacaatacgaattgaaaaaggaaccccaaaggagtcgattcttaaaaactctgcttctgttggtattatccaaagagatgagtcacccatggaaaaagggctctctggtctacgaggaagggactttgagctgtctgacgtgttttatttctccaagaagggattggaagccattgtagaagatgaagtgacccagaggttttcctcagaggagctagtgtcatggaatctcctcacaagaaccaatgtaaatttccagtacatcagtctgcggctcactatggtgtgggtgctgggcgtcatagtgcgctattgtgtcctactgcctctgagggttaccttggctttcattgggatcagtttgctggttataggaactacactggttgggcagctgccagacagcagcctcaaaaactggctgagtgaactggtccatctgacttgctgccggatctgtgtgcgagccctctctggtaccattcattatcataacaagcagtacagaccccagaagggaggcatttgtgttgccaaccatacttcccccattgatgttttaatcttgacaacggatggatgttatgctatggttggccaggttcatggcggcttgatgggaattattcagagagctatggtcaaggcttgtcctcatgtctggtttgaacgctcagaaatgaaggatcgacacctggttactaagagactaaaagaacatattgctgataagaagaaactacccatactaatttttcctgaaggaacttgcatcaacaatacttcagtcatgatgtttaaaaaggggagctttgaaattggaggaaccatacatccagttgcaattaagtataaccctcagttcggtgatgcattttggaacagtagtaaatacaacatggtgagctacctgcttcgaatgatgaccagctgggccatcgtctgtgacgtgtggtacatgccccccatgaccagagaggaaggagaagatgcagtccagtttgctaacagggttaagtctgctattgctatacaaggaggcctgactgaacttccctgggatggaggactaaagagagcaaaggtgaaggacatctttaaggaagagcagcagaaaaattacagcaagatgattgtgggcaatggatctctcagctaagaggacggatgacagcctttagatctagaactagcccttagaaatggaatggctttttttgttttgttttgttttattgttttgtttttattattgttaatcttttctacagaatgattgtctctacctctttatgccagaggcagaacctacaggtgccctttttggcttttgttgttgttgtaacattagccccatggattgtaaggtggtttactgagttaaaacagattctgcttttgtaaaatgatggcatcactgtggactgaatgaaatatttgtatagaaaaaagtgcttgaaaagtgtgtttggaactcatcgatagggtaattctccaaaaatgcccaaactctttttctgtaattagccttgccactttcttcagtcacttaaatggtgagattacacatcagtgcaagatgaccattatggttatggtctactgcaaggttgaaaggaaaaatggaggattgtatttaggaaaagggacaactttgtggccacctgctctgaaagtcaaaaggaaatgtaaattagtgtcattagtgtgttggaagagaaatactattcagtaagcttcgccaaagaaaagtgagtcaaagttaatgtgtgtgcgcatttatatgtaggcagctcgtagaccacattttaaccagcaactggtaacaaagagcttagttttccttgtttgaatgctgtagatctgtacctagtacccctcccatctactgatttgtttgtttttgtaaccaaacacattttcagatagaaggagccttaaaaaaaaaaaatcacattgagtaacttcagtatgaatgaatgagagtgtgtggagctacccctcaccctccacccctttgtgctttttattcccgaattttcccagtctcttaaacagaaaaatgactgatataattatcttttggaaactgagccttaattttttttagagggggaaataagttttccccaactcacacagcataagcaatgtttgacagcaatataatgccgttgtaaactactgagagtattgtatctgttctggtaaccatgtacagaatgtgaaactgtcttatgaatataaataaattctatatttcta

SEQ ID NO: 352 - DNA, 3782 bp, Homo sapiens
cgcccgtcgtggtcaacgggccagccgagtctggagtggttgcgaacccttctggctgcagatctggaggtggaggcagtaccctggactctattctgctgccccttcagggtttggaggagccggagcatccctcgcgtcctgtcacttccagcgaggcacacaaaactgaccgtagggatggccaccagggtccggacagcttctatttgggtcccacctctccaagaacgaaacagttcatgggataggatcagaaagctccaaggtcaggaatccatcttgggccaagggactcctggtctgcaacctctccctggaacacccaggcagaagcagaagagtcgcagaatagagaaagtcctagagtggctgtttatttcccaagagcagccaaaaatcaccaagtcctggggacctttgtcattcatggatgtgtttgtggattttacctgggaggagtggcagctgctagacccagcacagaagtgcctgtacaggagtgtgatgttggagaactatagcaacctggtgtccctagggtaccaacacaccaaacctgatatcatcttcaagttggaacaaggagaagagctgtgtatggtgcaggcccaagttccaaatcagacctgtccaattttgaaggctggaaagtccaaagccaaggtgctggcaggtttggtgtctggtgagggcctgctctgtgcttccaagatgacgccttgttgctgcatcctctggagacacagtctggaaaattgatgatcttatggattggcatcaggaaaataaagacaagctgggaagtacggcaaaaagctttgaatgcactacatttggaaaactatgtcttcttagtacaaagtatctttcaagacaaaaacctcataaatgtggcacgcatggaaagagtttgaaatatatagatttcactagtgattatgctagaaataatcctaatgggtttcaggtacatggaaaatcattcttccattctaaacatgagcaaactgttattggaataaaatactgtgaaagtattgaatctggaaaaaccgtcaataagaaatcgcaacttatgtgccaacaaatgtatatgggcgaaaaaccctttggatgcagctgttgtgagaaagccttcagcagcaagtcataccttctagtgcatcagcaaactcatgccgaagagaaaccctatggttgtaatgaatgtgggaaagacttcagtagtaaatcatacctcattgtacatcagagaattcatacaggagagaaactacatgaatgcagtgaatgcaggaaaacattcagtttccattcacagcttgttatacatcagagaattcacacaggtgagaatccctatgagtgctgtgaatgtgggaaagtcttcagtaggaaagaccagcttgtttcacaccagaaaactcattcaggacagaaaccatatgtgtgtaatgaatgtgggaaagcttttggtttaaaatcacagctcattatacatgaaagaattcatacaggagagaaaccatatgaatgcaatgaatgtcagaaagcctttaatacaaagtcaaaccttatggtacatcagagaacccatacaggggagaaaccttatgtttgtagtgattgtggaaaagcctttacattcaagtcacagctcattgtacatcaggggattcacacaggagtaaagccctatgggtgtattcagtgtggtaaaggattcagtttgaaatcacagctcattgtacatcagagaagtcacacaggaatgaaaccttatgtatgcaatgaatgtggcaaagccttcaggagcaagtcataccttattatacatacaaggactcatacaggagaaaaactccatgaatgcaacaattgtgggaaagccttcagttttaaatcacagctcattatacatcagaggattcatacaggagagaacccctatgaatgccatgaatgtgggaaagccttcagtcggaaataccagcttatttcacaccagagaactcatgcaggagagaagccttatgaatgcaccgactgtggaaaggcttttggtttaaagtcacagcttattatacaccagagaactcatacaggggagaaaccatttgaatgtagtgagtgtcagaaagcctttaatacaaagtcaaacctgattgtacatcagagaactcatacaggagagaaaccctatagttgtaatgaatgtggaaaagcctttacgttcaaatcacagctcattgtacataaaggagtgcacactggagtaaaaccctatggatgcagtcaatgtgcaaaaacctttagtttgaagtcccagctcattgtacatcagagaagtcacacaggagtaaaaccatatggatgcagtgagtgtgggaaagccttcaggagcaagtcataccttattatacatatgagaactcatacaggagagaaaccacatgagtgcagggaatgcgggaaatcctttagtttcaattcacaactcattgtgcatcagagaattcacacaggagaaaatccctatgaatgcagtgaatgtgggaaagcctttaataggaaagaccagctcatttcacatcagcgaactcatgcaggggaaaagccttatgggtgcagtgaatgtgggaaagcttttagcagcaagtcatacctaattatacacatgagaactcattcaggtgaaaaaccatatgaatgtaatgaatgtgggaaagccttcatttggaaatcactactcattgtacatgagcgaactcatgcaggggtcaacccttataaatgcagtcaatgtgagaaatccttcagtgggaaattacgccttcttgtacaccagagaatgcacacaagagagaaaccatatgaatgcagtgagtgtggaaaagccttcattaggaattctcaactcattgtacatcaaagaactcattcaggagagaaaccctatgggtgcaatgaatgtgggaaaaccttctctcaaaaatcaattctcagtgcacatcagagaacacatacaggagagaagccttgtaagtgcactgaatgtgggaaagccttttgttggaagtcacagctcattatgcatcagagaactcatgtagatgacaaacattgataattttacgaaactctgaaaagtggattcacaagagatagaaacaatcatatataaagagaaactctgtaagtggaatcatcttgtcatcttccagaaaactcatactgaatagaactttatgaatgcacagcatatggaaaggcatccacagaaagctgttctttacatgcaaaaagatagtagacaatacacaggaaaactgaatttagtaaccactctgaaaatttttagcagcaagtcatacctttttttaaaaagttcatacaggtgaggaaccatgttaaacgttgtaaagtcattttactaacataagattcacaaagaggaaacttcatgaaccagatgaatatagaatagacttctttgaaattcatagtttacagaattttaatgagagaaattattgagctaatgaatggcagaattaacaaaattacaaacattttatgtatcggaagcatataccttggagggaccatgctatgagggaaagtgtaaatctagaaatgagaaacccctagggaaaaaatatatataggagtgaacatcttatgaatgtaccaaataaaccacagctggactgttaacctcaccttagaagcttctttctaaaaaaaaaaaaaaaaaaaaaaaaaaaaaaaaaaaaaaa

SEQ ID NO: 353 - DNA, 1998 bp, Homo sapiens
atgctgcgcgagcggaccgtgcggctgcagtacgggagccgcgtggaggcggtgtacgtgctgggcacctacctctggaccgatgtctacagcgcggccccagccggggcccaaaccttcagcctgaagcactcggaacacgtgtgggtggaggtggtgcgtgatggggaggctgaggaggtggccaccaatggcaagcagcgctggcttctctcgcccagcaccaccctgcgggtcaccatgagccaggcgagcaccgaggccagcagtgacaaggtcaccgtcaactactatgacgaggaagggagcattcccatcgaccaggcggggctcttcctcacagccattgagatctccctggatgtggacgcagaccgggatggtgtggtggagaagaacaacccaaagaaggcatcctggacctggggccccgagggccagggggccatcctgctggtgaactgtgaccgagagacaccctggttgcccaaggaggactgccgtgatgagaaggtctacagcaaggaagatctcaaggacatgtcccagatgatcctgcggaccaaaggccccgaccgcctccccgccggatacgagatagttctgtacatttccatgtcagactcagacaaagtgggcgtgttctacgtggagaacccgttcttcggccaacgctatatccacatcctgggccggcggaagctctaccatgtggtcaagtacacgggtggctccgcggagctgctgttcttcgtggaaggcctctgtttccccgacgagggcttctcaggcctggtctccatccatgtcagcctgctggagtacatggcccaggacattcccctgactcccatcttcacggacaccgtgatattccggattgctccgtggatcatgacccccaacatcctgcctcccgtgtcggtgtttgtgtgctgcatgaaggataattacctgttcctgaaagaggtgaagaaccttgtggagaaaaccaactgtgagctgaaggtctgcttccagtacctaaaccgaggcgatcgctggatccaggatgaaattgagtttggctacatcgaggccccccataaaggcttccccgtggtgctggactctccccgagatggaaacctaaaggacttccctgtgaaggagctcctgggcccagattttggctacgtgacccgggagcccctctttgagtctgtcaccagccttgactcatttggaaacctggaggtcagtcccccagtgaccgtgaacggcaagacatacccgcttggccgcatcctcatcgggagcagctttcctctgtctggtggtcggaggatgaccaaggtggtgcgtgacttcctgaaggcccagcaggtgcaggcgcccgtggagctctactcagactggctgactgtgggccacgtggatgagttcatgtcctttgtccccatccccggcacaaagaaattcctgctactcatggccagcacctcggcctgctacaagctcttccgagagaagcagaaggacggccatggagaggccatcatgttcaaaggcttgggtgggatgagcagcaagcgaatcaccatcaacaagattctgtccaacgagagccttgtgcaggagaacctgtacttccagcgctgcctagactggaaccgtgacatcctcaagaaggagctgggactgacagagcaggacatcattgacctgcccgctctgttcaagatggacgaggaccaccgtgccagagccttcttcccaaacatggtgaacatgatcgtgctggacaaggacctgggcatccccaagccattcgggccacaggttgaggaggaatgctgcctggagatgcacgtgcgtggcctcctggagcccctgggcctcgaatgcaccttcatcgacgacatttctgcctaccacaaatttctgggggaagtccactgtggcaccaacgtccgcaggaagcccttcaccttcaagtggtggcacatggtgccctga

SEQ ID NO: 354 - DNA, 540 bp, Homo sapiens
tttttttttttttttggggtctccactactgggaagggtctctggcaagtcagggcctctgcggtctctcctcaggcaacgctgcttatccccttcccttcctctcttccacagtctccatgtgtttagccgccttctctgaacaaccctcactctgtggaatttaagctcaacattctactgcccttttgtggcttgtaatccacttttgtaatgccttcttacctatacttaaaccttctctacagggagtgggaatctaaaagggaaaaataacaagggcctagttactttccctcttgcttagaaaaatttgtgcgcataaaaatccttgttaatcatggggacaatgatgagtattccagataactcaccattaggatgcccttcaggctaattcagcttaaagaaaaattcattttctattgcaaaaccgtttgggttcaatacaaactataaaaccaacagatatggcctaaacatggttctatatgctatgatattttacagttggactttttctgtaaaaaagaaggaaaa

SEQ ID NO: 355 - DNA, 2055 bp, Homo sapiens
atgcagtcccgggaagacgtcccgcgctctcgccgcctcgccagtccccgtggtgggaggcggcccaagaggatttccaagccctcggtttcggcctttttcacgggtccagaggagttaaaggacacggcccattctgcagccctgctggcacagctcaagtccttctacgacgcgcggctgctgtgtgatgtgaccatcgaggtggtgacgcctggcagcgggcctggcacgggtcgcctcttttcctgcaatcgcaacgtgctagcagctgcgtgtccctacttcaagagcatgttcacaggtggcatgtacgagagccagcaggccagcgtgaccatgcacgatgtggacgccgagtccttcgaggtgttggtcgactactgctacacgggtcgtgtgtctctcagtgaggccaatgtgcagcgcctgtacgcggcctccgacatgctacagctggaatatgtgcgggaagcctgtgcctccttcttagcccgacgtcttgacctgaccaactgcaccgccatcctcaagtttgcagacgccttcgaccatcacaagcttcgatctcaggcccagtcctacatagctcacaacttcaagcagctcagccgaatgggttcaattcgggaggagactctagcagatctaaccctggcccagctgctggctgtcctacgcctggatagtctggacatagagagtgagcggactgtatgccatgtagctgtgcagtggctggaggctgctgccaaagagcggggtcccagtgctgcagaagtcttcaagtgcgtgcgctggatgcacttcactgaagaagatcaggactacttagaagggctgctgaccaagcccatcgtgaagaagtactgcctggacgttattgaaggggccctgcagatgcgctatggtgacctgttgtacaagtctctggtgccagtgccaaacagcagcagcagcagtagcagcagcaactctcttgtatctgcagcagaaaatccaccccagagactgggtatgtgtgccaaggagatggtgatcttctttggacatcctagagatccctttctctgctatgacccttactcgggggacatttacacaatgccatcccctttgaccagctttgctcacactaagactgtcacctcctcagctgtctgtgtgtccccagaccatgacatctatctagctgctcagcccaggaaagacctctgggtgtataaaccagctcagaatagttggcagcaacttgcagatcgcttgctgtgtcgtgagggcatggatgtggcatatctcaatggctacatctacattttggggggacgagaccctattactggagttaagttgaaggaagtggaatgctacagtgttcagagaaaccagtgggcattggtggctcctgtccctcattccttctattcctttgaactcatagtggttcagaactatctttatgctgtcaacagtaagcgcatgctttgctatgatcctagccacaatatgtggctgaactgtgcttctcttaaacgtagtgactttcaggaagcatgtgtcttcaatgatgaaatctattgtatctgtgacatcccagtcatgaaggtctacaacccagctaggggagaatggaggcggattagtaatattcctttggattcagagacccacaactaccagattgtcaatcatgaccaaaagttgcttctcatcacttctacaaccccacaatggaaaaagaaccgagtgacagtgtatgagtatgatactagggaagatcagtggattaatataggtaccatgttaggccttttgcagtttgactctggctttatttgcctttgtgctcgtgtttatccttcctgccttgaacctggtcagagttttattactgaggaagatgatgcacggagtgagtctagtactgaatgggacttagatggattcagtgagctggactctgagtcaggaagttcaagttctttttcagatgatgaagtctgggtgcaagtagcacctcagcgaaatgcacaggatcagcagggttctttgtaa

SEQ ID NO: 356 - DNA, 2722 bp, Homo sapiens
tttttttttttttttggggtctccactactgggaagggtctctggcaagtcagggcctctgcggtctctcctcaggcaacgctgcttatccccttcccttcctctcttccacagtctccatgtgtttagccgccttctctgaacaaccctcactctgtggaatttaagctcaacattctactgcccttttgtggcttgtaatccacttttgtaatgccttcttacctatacttaaaccttctctacagggagtgggaatctaaaagggaaaaataacaagggcctagttactttccctcttgcttagaaaaatttgtgcgcataaaaatccttgttaatcatggggacaatgatgagtattccagataactcaccattaggatgcccttcaggctaattcagcttaaagaaaaattcattttctattgcaaaaccgtttgggttcaatacaaactataaaaccaacagatatggcctaaacatggttctatatgctatgatattttacagttggactttttctgtaaaaaagaaggaaaaatgtgttctgctttcccagggtccatggcaggagggctgcagcggcctcatttattcatttgtgccaggcaccctgttaatcatggagataccacgctgacctgccttcaaggagaccatattctagtaggagagctgagcagcgagatggccatgtgtagatggtgctatatgaaagatcaccctgatgtagaagccaggtggggcatcttggcttcctgctccttttctttcatatgacaccgaaaagtctctggatattgcagttgggccagacctgcagaaaaagagaacattcagttaaacagaagaacatattctggagaaaatggggaagagagtgaagacacagctggttcaagggaaaaatgccaactgagcacagagagaaaaatgcctgctgagagctccacaaataaagaaacaacttacataaagtggtgagaagcacaggagaggacagggccggggctgagaggctgaagttccaggaccggttctgcatttgctgctgtgtgacatggggccagtgacttcccatctctgggcttcagttttctcaattatcatctattctcctgctttctctataacattcatttattgattccttgattcaagaatatttcttaagcacccagtttgtgccaggtacagctgtcagtgctagtgattcagcaatgaacaaagtggacaaaaagcacatccttatgtgagccctcatgcatgcagcaaacacaatcagtgaaatatggtgcagattcatttgtaataaggagaaaacagaaagcacagaaggggtcaggcagtctaatctggaagggtgacctctgagtcaagacataaggaggtgagggagtgagccaggaggacatctgggcaaagcctgctccaggcagaggggacagccagtgtgagagctgccctgaatgcaaagcctacccactgccccttcttttggtgtctccactggcctgctggctgcagcagccttctatcagacctcccagcctccatctcctcccctggggtcttctagccccacatggccagccagggtgactctaaaatataagtcagaccccaacacgtccctgctcaaaacccaccaggtgctcccaccacattcaatgcagtgcaagtcctcaccatggtcctctagcatctctccaagcccatctgcctcctctctccctcacttgctcctttccagctacactggcctctgctgtacctgggacatgccaagcaagacccagccttggggtctttgctcacggcctctgcctggatgttcttcccccagttatccacaggtctggcttcctgactttattcagaggccaccctctcaagaagacacccttgactgtttcgtctaagcaagaccctgtcacatccaaccactcgcctcgctttattttcccttacagcatttatcatgacctcccatcattttatatatttataatagtagatatgatcaatggatcagatgtttattatgtgatggacactgttctaaacatcctagaattaattcatcttctcccaaactccttgagattggtattgccattgaccacattttatatatcaataacccaagatagagagaggttaagaaatttgctcaaggtctcccatctggtgagtgtcagatcaggattcaaaccctggagcttccattatgagccacaacactctagaccagggctgcccagtagaactttgcaatgatgaaaatgttctgtgtctgcactgcccgaagtgactgccactggatatgtgtaagtgttgagcatttgaaatatgtgtgaccaaggaactgaattttgaattttattgcatttccatgactttagatttaaatagccaggctagtggctaccaaattgtacatagagccctcgcacctcttatttgctcctttgttaatttctgtctgccacataaggatgaaactggcctatgcattagtttcctcattttacagtaagggaaacacccctggtacaaagtaaatactcaatgctcattaatcaccatcatcatcaccattattataacattatcattattagtctccatgagatcgatgactttatgtttgttcactcctgaatcccattacattctttagcacatagcaggtgttcaataaatatattatgaatgaatg

SEQ ID NO: 357 - DNA, 5313 bp, Homo sapiens
atgtcgggagcctcagtgaaggtggctgtccgggtaaggcccttcaattctcgagagaccagcaaggaatccaaatgcatcattcagatgcaaggcaactcgaccagtattattaacccaaagaatccaaaggaagctccaaagtccttcagcttcgactattcctactggtctcatacctcacccgaagatccctgttttgcatctcaaaaccgtgtgtacaatgacattggcaaggaaatgctcttacacgcctttgagggatataatgtctgtatttttgcctatgggcagactggtgctggaaaatcttatacaatgatgggtaaacaagaagaaagccaggctggcatcattccacagttatgtgaagaactttttgagaaaatcaatgacaactgtaatgaagaaatgtcttactctgtagaggtgagctacatggaaatttactgtgaaagagtacgagatttgctgaatccaaaaaacaagggtaatttgcgtgtgcgtgaacacccacttcttggaccctatgtggaggatctgtccaagttggcagttacttcctacacagacattgctgacctcatggatgctgggaacaaagccaggacagtggcagctacaaacatgaatgaaacaagtagccgttcccacgctgtgtttacgattgttttcacccagaagaaacacgataatgagaccaacctttccactgagaaggtcagtaaaatcagcttggtggatctagcaggaagtgaacgagctgattcaactggtgccaaagggactcgattaaaggaaggagcaaatattaataagtctcttacaactttgggcaaagtcatttcagccttggccgaggtgagtaaaaagaagaagaaaacagattttattccctacagggattctgtacttacttggctccttcgagaaaatttaggtggcaattctcggactgcaatggttgctgctctgagccccgcggatatcaactacgatgagactttgagcactctgagatatgcagatcgtgcaaaacaaattaaatgcaatgctgttatcaatgaggaccccaatgccaaactggttcgtgaattaaaggaggaggtgacacggctgaaggaccttcttcgtgctcagggcctgggagatattattgatacatccatggggtccctcacttcatccccatcttcctgctcactcagtagtcaggtgggcttgacgtctgtgaccagtattcaagagaggatcatgtctacacctggaggagaggaagctattgaacgtttaaaggaatcagagaagatcattgctgagttgaatgaaacttgggaagagaagcttcgtaaaacagaggccatcagaatggagagagaggctttgttggctgagatgggagttgccattcgggaagatggaggaaccctaggggttttctcacctaaaaagaccccacatcttgttaacctcaatgaagacccactaatgtctgagtgcctactttattacatcaaagatggaattacaagggttggccaagcagatgctgagcggcgccaggacatagtgctgagcggggctcacattaaagaagagcattgtatcttccggagtgagagaagcaacagcggggaagttatcgtgaccttagagccctgtgagcgctcagaaacctacgtaaatggcaagagggtgtcccagcctgttcagctgcgctcaggaaaccgtatcatcatgggtaaaaaccatgttttccgctttaaccacccggaacaagcacgagctgagcgagagaagactccttctgctgagaccccctctgagcctgtggactggacatttgcccagagggagcttctggaaaaacaaggaattgatatgaaacaagagatggagaaaaggctacaggaaatggagatcttatacaaaaaggagaaggaagaagcagatcttcttttggagcagcagagactggactatgagagtaaattgcaggccttgcagaagcaggttgaaacccgatctctggctgcagaaacaactgaagaggaggaagaagaggaagaagttccttggacacagcatgaatttgagttggcccaatgggccttccggaaatggaagtctcatcagtttacttcattacgggacttactctggggcaatgccgtgtacctaaaggaggccaatgccatcagtgtggaactgaaaaagaaggtgcagtttcagtttgttctgctgactgacacactgtactcccctttgcctcctgaattacttcccactgagatggaaaaaactcatgaggacaggcctttccctcgcacagtggtagcagtagaagtccaggatttgaagaatggagcaacacactattggtctttggagaaactcaagcagaggctggatttgatgcgagagatgtatgatagggcaggggagatggcctccagtgcccaagacgaaagcgaaaccactgtgactggcagcgatcccttctatgatcggttccactggttcaaacttgtggggagctcccccattttccacggctgtgtgaacgagcgccttgccgaccgcacaccctcccccactttttccacggccgattccgacatcactgagctggctgacgagcagcaagatgagatggaggattttgatgatgaggcattcgtggatgacgccggctctgacgcagggacggaggagggatcagatctcttcagtgacgggcatgacccgttttacgaccgatccccttggttcattttagtgggaagggcatttgtttacctgagcaatctgctgtatcccgtgcccctgatccacagggtggccatcgtcagtgagaaaggtgaagtgcggggatttctgcgtgtggctgtacaggccatcgcagcggatgaagaagctcctgattatggctctggaattcgacagtcaggaacagctaaaatatcttttgataatgaatactttaatcagagtgacttttcgtctgttgcaatgactcgttctggtctgtccttggaggagttgaggattgtggaaggacagggtcagagttctgaggtcatcactcctccagaagaaatcagtcgaattaatgacttggatttgaagtcaagcactttgctggatggtaagatggtaatggaagggttttctgaagagattggcaaccacctgaaactgggcagtgccttcactttccgagtaacagtgttgcaggccagtggaatcctcccagagtatgcagatatcttctgtcagttcaactttttgcatcgccatgatgaagcattctccacggagcccctcaaaaacaatggcagaggaagtcccctggccttttatcatgtgcagaatattgcagtggagatcactgaatcatttgtggattacatcaaaaccaagcctattgtatttgaagtctttgggcattatcagcagcacccacttcatctgcaaggacaggagcttaacagtccgcctcagccgtgccgccgattcttccctccacccatgccactgtccaagccagttccagccaccaagttaaacacgatgagcaaaaccagccttggccagagcatgagcaagtatgacctcctggtttggtttgagatcagtgaactggagcctacaggagagtatatcccagctgtggttgaccacacagcaggcttgccttgccaggggacatttttgcttcatcagggcatccagcgaaggatcacagtgaccattatccatgagaaggggagcgagctccattggaaagatgttcgtgaactggtggtaggtcgtattcggaataagcctgaggtggatgaagctgcagttgatgccatcctctccctaaatattatttctgccaagtacctgaagtcttcccacaactctagcaggaccttctaccgctttgaggctgtgtgggatagctctctgcataactcccttcttctgaaccgagtgacaccctatggagaaaagatctacatgaccttgtcggcctacctagagctggatcattgcatccagccggctgtcatcaccaaggatgtgtgcatggtcttctactcccgagatgccaagatctcaccaccacgctctctgcgtagcctctttggcagcggctactcaaagtcaccagattcgaatcgagtcactggcatttacgaactcagcttatgcaaaatgtcagacacaggtagtccaggtatgcagagaaggagaagaaaaatcttagatacgtcagtggcatatgtgcggggagaagagaacttagcaggctggcggccccgtggagacagcctcatccttgagcaccagtgggagctggagaagctggagctcctacatgaggtggaaaaaacccgccactttttgctgctgcgtgagagacttggtgacagcatccccaaatccctgagcgactcgttatcccccagcctcagcagtgggaccctcagcacctccaccagtatctcctctcagatctcaaccactacctttgaaagcgccatcacacctagcgagagcagtggctatgattcaggagacatcgaaagcctggtggaccgagagaaagagctggctaccaagtgcctgcaacttctcacccacactttcaacagagaattcagccaggtgcacggcagcgtcagtgactgtaagttgtctgatatctctccaattggacgggatccctctgagtccagtttcagcagtgccaccctcactccctcctccacctgtccctctctggtagactctaggagcaactctctggatcagaagaccccagaagccaattcccgggcctctagtccctgcccagaatttgaacagtttcagattgtcccagctgtggaaacaccatatttggcccgagcaggaaaaaacgaatttctcaatcttgttccagatattgaagaaattagaccaagctcagtggtctctaagaaaggataccttcatttcaaggagcctctttacagtaactgggctaaacattttgttgtcgtccgtcggccttatgtcttcatctataacagtgacaaagaccctgtggagcgtggaatcattaacctgtccacagcacaggtggagtacagtgaggaccagcaggccatggtgaagacaccaaacacctttgctgtctgcacaaagcaccgtggggtccttttgcaggccctcaatgacaaagacatgaacgactggttgtatgccttcaacccacttctagctggcacaatacggtcaaagctttcccgcagatgcccgagccagtcgaaatactaa

SEQ ID NO: 358 - DNA, 1887 bp, Homo sapiens
atggcggcggcagcagtcgacagcgcgatggaggtggtgccggcgctggcggaggaggccgcgccggaggtagcgggcctcagctgcctcgtcaacctgccgggtgaggtgctggagtacatcctgtgctgcggctcgctgacggccgccgacatcggccgtgtctccagcacctgccggcggctgcgcgagctgtgccagagcagcgggaaggtgtggaaggagcagttccgggtgaggtggccttcccttatgaaacactacagccccaccgactacgtcaattggttggaagagtataaagttcggcaaaaagctgggttagaagcgcggaagattgtagcctcgttctcaaagaggttcttttcagagcacgttccttgtaatggcttcagtgacattgagaaccttgaaggaccagagattttttttgaggatgaactggtgtgtatcctaaatatggaaggaagaaaagctttgacctggaaatactacgcaaaaaaaattctttactacctgcggcaacagaagatcttaaataatcttaaggcctttcttcagcagccagatgactatgagtcgtatcttgaaggtgctgtatatattgaccagtactgcaatcctctctccgacatcagcctcaaagacatccaggcccaaattgacagcatcgtggagcttgtttgcaaaacccttcggggcataaacagtcgccaccccagcttggccttcaaggcaggtgaatcatccatgataatggaaatagaactccagagccaggtgctggatgccatgaactatgtcctttacgaccaactgaagttcaaggggaatcgaatggattactataatgccctcaacttatatatgcatcaggttttgattcgcagaacaggaatcccaatcagcatgtctctgctctatttgacaattgctcggcagttgggagtcccactggagcctgtcaacttcccaagtcacttcttattaaggtggtgccaaggcgcagaaggggcgaccctggacatctttgactacatctacatagatgcttttgggaaaggcaagcagctgacagtgaaagaatgcgagtacttgatcggccagcacgtgactgcagcactgtatggggtggtcaatgtcaagaaggtgttacagagaatggtgggaaacctgttaagcctggggaagcgggaaggcatcgaccagtcataccagctcctgagagactcgctggatctctatctggcaatgtacccggaccaggtgcagcttctcctcctccaagccaggctttacttccacctgggaatctggccagagaagtctttctgtcttgttttgaaggtgcttgacatcctccagcacatccaaaccctagacccggggcagcacggggcggtgggctacctggtgcagcacactctagagcacattgagcgcaaaaaggaggaggtgggcgtagaggtgaagctgcgctccgatgagaagcacagagatgtctgctactccatcgggctcattatgaagcataagaggtatggctataactgtgtgatctacggctgggaccccacctgcatgatgggacacgagtggatccggaacatgaacgtccacagcctgccgcacggccaccaccagcctttctataacgtgctggtggaggacggctcctgtcgatacgcagcccaagaaaacttggaatataacgtggagcctcaagaaatctcacaccctgacgtgggacgctatttctcagagtttactggcactcactacatcccaaacgcagagctggagatccggtatccagaagatctggagtttgtctatgaaacggtgcagaatatttacagtgcaaagaaagagaacatagatgagtaa

SEQ ID NO: 359 - DNA, 1818 bp, Homo sapiens
atgatggacttggagctgccgccgccgggactcccgtcccagcaggacatggatttgattgacatactttggaggcaagatatagatcttggagtaagtcgagaagtatttgacttcagtcagcgacggaaagagtatgagctggaaaaacagaaaaaacttgaaaaggaaagacaagaacaactccaaaaggagcaagagaaagcctttttcgctcagttacaactagatgaagagacaggtgaatttctcccaattcagccagcccagcacatccagtcagaaaccagtggatctgccaactactcccaggttgcccacattcccaaatcagatgctttgtactttgatgactgcatgcagcttttggcgcagacattcccgtttgtagatgacaatgaggtttcttcggctacgtttcagtcacttgttcctgatattcccggtcacatcgagagcccagtcttcattgctactaatcaggctcagtcacctgaaacttctgttgctcaggtagcccctgttgatttagacggtatgcaacaggacattgagcaagtttgggaggagctattatccattcctgagttacagtgtcttaatattgaaaatgacaagctggttgagactaccatggttccaagtccagaagccaaactgacagaagttgacaattatcatttttactcatctataccctcaatggaaaaagaagtaggtaactgtagtccacattttcttaatgcttttgaggattccttcagcagcatcctctccacagaagaccccaaccagttgacagtgaactcattaaattcagatgccacagtcaacacagattttggtgatgaattttattctgctttcatagctgagcccagtatcagcaacagcatgccctcacctgctactttaagccattcactctctgaacttctaaatgggcccattgatgtttctgatctatcactttgcaaagctttcaaccaaaaccaccctgaaagcacagcagaattcaatgattctgactccggcatttcactaaacacaagtcccagtgtggcatcaccagaacactcagtggaatcttccagctatggagacacactacttggcctcagtgattctgaagtggaagagctagatagtgcccctggaagtgtcaaacagaatggtcctaaaacaccagtacattcttctggggatatggtacaacccttgtcaccatctcaggggcagagcactcacgtgcatgatgcccaatgtgagaacacaccagagaaagaattgcctgtaagtcctggtcatcggaaaaccccattcacaaaagacaaacattcaagccgcttggaggctcatctcacaagagatgaacttagggcaaaagctctccatatcccattccctgtagaaaaaatcattaacctccctgttgttgacttcaacgaaatgatgtccaaagagcagttcaatgaagctcaacttgcattaattcgggatatacgtaggaggggtaagaataaagtggctgctcagaattgcagaaaaagaaaactggaaaatatagtagaactagagcaagatttagatcatttgaaagatgaaaaagaaaaattgctcaaagaaaaaggagaaaatgacaaaagccttcacctactgaaaaaacaactcagcaccttatatctcgaagttttcagcatgctacgtgatgaagatggaaaaccttattctcctagtgaatactccctgcagcaaacaagagatggcaatgttttccttgttcccaaaagtaagaagccagatgttaagaaaaactag

SEQ ID NO: 360 - DNA, 253 bp, Homo sapiens
gggagtgcagtccgatgctgcagaagacagactgttccctctctcttcccacagtgtttctcgtctaccttttgcccttattcaatagtgggaagaaatttcttcttgacctcagcaatcctttctgacaattaccatatgcctcaagagacctgggaagcttcgccctgtctggcacagggagacaattcctatccagaataaaactgaaagcttccaaaaaaaaaaaaaaaacaaaaaaaaaaaaacatgt

SEQ ID NO: 361 - DNA, 689 bp, Homo sapiens
ttttttttttttttttttagagtcaataactttatttgtgctgatgattacaatgatatatatatacatctgtcaaaactcattgatctgtacattttattttatgtaaaataattgtgtaataaaatatgtaacataattttttaataaaaagcaacagagtgaagtaatcctggcatggcagccccagcatgttggttgggaatgtaactgtacaatggagagagatgaactctgcgacacactgagctgagtttatatcctttctttactacttatcaatggtgaccttgggcaaattgttcactctctgcaagccttagttttctcatctgaaaaatggtgctggtgctagcactttacttcacagatttgcaaggaagagctaatgagtataagtagttaaagtatctagcatggtttctggtagtttacagtcccacagaagaaaacatgccctaagggtaagtggttatctgccaagaaaaaaggtggacagtgaatggggaaaaaaagtcttcaattatgagaaccttgaagattttcacgtcttgaagatgccttttattgacccttgctttggtaacatgatctgggaaagtagaatccttcctgctctaaatcatctactcttcggaaatatataaattccgcctctacagtagcagagctccacaagaagcctgccc

SEQ ID NO: 362 - DNA, 318 bp, Homo sapiens
atgtctatatatttccccattcactgccccgactatctgagatcggccaagatgactgaggtgatgatgaacacccagcccatggaggagatcggcctcagcccccgcaaggatggcctttcctaccagatcttcccagacccgtcagattttgaccgctgctgcaaactgaaggaccgtctgccctccatagtggtggaacccacagaaggggaggtggagagcggggagctccggtggccccctgaggagttcctggtccaggaggatgagcaagataactgcgaagagacagcgaaagaaaataaagagcagtag

SEQ ID NO: 363 - DNA, 786 bp, Homo sapiens
atggcgtctcagctccagaaccgactccgctccgcactggccttggtcacaggtgcggggagcggcatcggccgagcggtcagtgtacgcctggccggagagggggccaccgtagctgcctgcgacctggaccgggcagcggcacaggagacggtgcggctgctgggcgggccagggagcaaggaggggccgccccgagggaaccatgctgccttccaggctgacgtgtctgaggccagggccgccaggtgcctgctggaacaagtgcaggcctgcttttctcgcccaccatctgtcgttgtgtcctgtgcgggcatcacccaggatgagtttctgctgcacatgtctgaggatgactgggacaaagtcatagctgtcaacctcaagggcaccttcctagtcactcaggctgcagcacaagccctggtgtccaatggttgtcgtggttccatcatcaacatcagtagcatcgtaggaaaggtggggaacgtggggcagacaaactatgcagcatccaaggctggagtgattgggctgacccagaccgcagcccgggagcttggacgacatgggatccgctgtaactctgtcctcccagggttcattgcaacacccatgacacagaaagtgccacagaaagtggtggacaagattactgaaatgatcccgatgggacacttgggggaccctgaggatgtggcagatgtggtcgcattcttggcatctgaagatagtggatacatcacagggacctcagtggaagtcactggaggtcttttcatgtaa

SEQ ID NO: 364 - DNA, 3340 bp, Homo sapiens
gaagttaagtgatgtccctgtttgcagtgtcaatgagattgagggcttgggcttgaacccaaccttctccctccaaatagcctgctctttctgttatgtcatgtttcatatacaagtttgggagcctccagccctgactatcccaacatatacaacataatgtatatgttgtctttggaaatatcttctgtgaaggccaagcatttaatattacaggaaaccttgaagtggatatggaagcttggcagccagcttggatcttcctaagagcctctttccttcataccatcttcagattgttattccgtgacatcttatctacttaagcagctaacccatgaggcatccaaaacagagagaaaaaacagagtgaacattttgccttatggaattgtcaaaagttgcggtcgaaacacaggcaagatttggaagaatctgtaatgagccagggccagttttcctagttatagagcctaggctggaggaggtacatgggctggggaaggagagggaattagagattggctgttcctggaaactctctgcctgtactccatggcctgagtcccaggacctggaagcggctgaaaatctgagatatagaagagactggtgctgcctttctggggagggcttgggaaaacagcaagttccctgaatttttccatggcacaggagcagatgaaatgtcatgattggtgtccaggctagtggactgagttaactcccgagagtccctgtactctccagcatggcacgaggagaagcaaaccattttcctatgcagccataggaaaacggtacaaacacgacactgaaattcagctgaccgcaagagcttgatggtcagtgtgagccagatggagcaggaacatgtatggatggaaaacccagatccaaagttcatccccctctcccgtggatgctccagcacattgcaaggtttcccagaaacttagaggcaaccttggcacaaggacatgatttgttggaaattaagttttgtcacctgggggactgcgagcttgatacggaaattaattcagttatataattataaaaatgatgcactttctacacatctgattttgtgaacccaaattagtttccacaacgcaactgtgttaacatttgccaacctctggggcaacattggttgtctttgttgcttttttctagaagttttcagctcaaactcatctttcccttttttattttcatttctaaattctggtgagtggtgttttgataagtagatatcagctatttcctgtcttacttgaaaagtcttctctgtattaaataacaaaggtcacttagataaatatcttctcattaccagagggtagggaactgcttctcctatacataacttctattatctttcaatccagaaaaaaaaacgtggcaggaggacaagtttttgaatgttatgaatcgtgatttctgtgtctaaaatctgctcttttgttaacactaagggcaacttccttcaaagtggttcatcttggtctattactgtgtttgtgtgtgtgtgtgtgtgtgtgtgtgtgtgtgtgtgtgtgtgtagtaaaaccaaagtttcctattatttttgaaggtatttggccctgctggaagacagctatgtataagttgaacttggcagagagaaagggaaaccagatcttactcccaggcctcctgtcaccagctgtgtgactttgctgaagtcatttctttcccctaagtctcagttccaatacctataaagtgagtgttctgcctgtgtgtgttttaggtctttattaatgttgaaatgtcctgactttatgggttctcattcactgtgatgtggtaaccaaaacaagcagagattaataaccaggactcaataatgtaaaacactaaaaattatatttttgcaaatttttgtaaacgcgggatcatatctctctcagtgacagtattggtgtgatccattattgtacatttagtggataaacagaatgtaactaagaagtgttatctttgttatcaggggaacgtggagttggatgtgtatgatggggatgggcagttaattcataggttaaacactcaacgagggaatatctctttatcgctatctccaaagactccccactcttcctcaattttcttagtaactcactgctcagacttagtttccccagaagcagactatgagaccaggatttgatgcaagcagtttttttggagttgatctcagaaaggctaagagagtagagaagtaatacagagaagtgaagaaagctaatagaaggtcccggtgctctctcctgaaagagagcgctggaagactgagtagaacatgccccagagttgtccccctctgctggggcaagagaactagggtactgatcagctaatttccgtgcttcactggttaagggcattaacctccccaaacttctggcctgtgccccagatagaccaggcatgcttctgtggccagagaaagcccgaggatggagagtcacagatgcttgtggtaggtagcaggtggtgtgtatggaaatgggaatgggatgccaaggggatttgggcagggcaccaagcatctgccgcattaccctaatccaggcaataacactcacagtatcccagggattccccttctagcctcgaattcctcttattctcatttattttgtatttactttctagaccatagtttctcagatagtaaaggttctactgactttcctcatctctctgcaacctctttcctgcctagcttctcttccatggtcaagccaatacacacagaattttgccttccattcttcactcaggtgtttcttccacttggaatctgttcctcagtcattttcactaatccatgtccctcccagtacacagaatttttcacagaaaacatagttaatcctttaaaaatatatttagattgacttgcatgcccctcttaaggttttttctttccaaatgccttttttaaaaccccaatttaagaatttctttagccaatactacaacaatgcagtccttgttctccacttctttccttttatctactcaatgttattaatctttttagtgtaaacatcagtaactcaatcgagccttttctgatccccatgattaggatgagtttttgtgttgcctactccaaaaggtctgtcctttttaatgctcaccacacttgaggtttctgttcacacttcaaaggctgtggggcccgataccatgattttgctgcactcctagacctggcctactggtacatagtaggcattgataaaaatttgctggagcattgcataaataaactatgccatttggggctgattaacatttt

SEQ ID NO: 365 - DNA, 198 bp, Homo sapiens
atgtatgccatcgacctcatgctgaagtgggacaaccgtccagatggaaagcgggtgatgcagctgcagatcctggaggtgaacttcaaccctgactgcaagcgagcctgcaggtaccatctctccttcttcaacaacgtcttcagcaccttgtttctggaccagcccagtgactgtcatgtcgcctgccttgtctag

SEQ ID NO: 366 - DNA, 1500 bp, Homo sapiens
atgaatgatgacccaagtatggaagagaatggtgttgaacgcgtgtgtcctgagagcctgctgcagtccagggaatattcctcactaccattacccagacacacttcatcgacagacggtactataacttcaagtgatcctggattagaaattctgaatatggcttcttgtgaccttgacagaaactcgctctgtaagaaagaggaggatacaagatcagcttctcccacgatagaggcccaaggcacaagtccagctcatgataatattgcattccaagactctacgagtaaggataaaaccatattaaatctggaagccaaagaggaaccagaaacaatagaagaacataaaaaagaacatgcttcaggagactctgtggtttcccctcttcctgtaaccactgtgaaatcggttaaccttagacaaagtgagaacacttctgctaatgagaaggaggtggaggcagaatttctcagattatctttgggatttaagtgtgactggtttaccttggagaagagagtgaagcttgaagagaggtcccgtgacttggcagaagaaaatttgaagaaagaaatcactaactgtttaaaactattagagtctttaacacctctgtgtgaagatgacaaccaggcacaggaaatcattaagaagctggagaagagtataaagtttcttagccagtgtgcagcacgagtggccagtagggctgagatgttgggagccatcaatcaggaaagccgggttagtaaagcagttgaagtgatgattcagcacgtagaaaacttgaagaggatgtatgccaaagagcacgctgaattagaagaactgaaacaggttcttctgcagaatgaaaggtctttcaatcctcttgaagatgatgatgactgccaaattaaaaaacgttcagcttctctaaactccaagccatcttctctacgaagagtgactattgcctctttacccagaaatattggaaatgcaggaatggtggctgggatggaaaataatgatcgattcagtagaaggtcaagcagttggcgtattttggggtcaaagcagagtgaacaccgtccctcattacctcgatttattagcacctattcctgggcagatgctgaagaagaaaaatgtgaactaaaaactaaagatgactcagagccatctggagaagaaacagtagaaaggacaaggaagccaagtctttctgaaaagaaaaataatccatcaaagtgggatgtctcttcagtttatgacacaatagcttcctgggcaacaaatctcaagtcctccatcagaaaggctaataaggccctctggctctctattgcattcattgtactgtttgcagctttgatgagcttcctcacaggccaattattccagaagtctgtggatgccgctcccacacagcaagaggactcatggacgtctctagaacatatcttgtggccatttaccagactccgacacaatgggccaccaccagtgtga

SEQ ID NO: 367 - DNA, 502 bp, Homo sapiens
ttttttttttttttggtgagtaggtaacatgatacctagtgtatgtcacatgaagaacctaagtggaaagactataatgtttccctgtcttacttctatccattcaactaacaagtatttgtttggccagacctgttactacaatgcagacagctctagtcactttggtctcccttttggctcagttttgcctcaatccaaggggttaatattgactttgggcaggaagaggacaaggagctcaccttcaggtcaaattccagttctccaactttggcctgctccatgtccccaaactctcctggttctgaatttctgctttatatcaaccattctctgtaatggacttcctgtactagacatcagtctagtctggcagtatttcctgccaaagacatgtgggcaaggggctgagtcacggcattctttgaactatgccagctgatcatcagttctatgcctgctctaacagccatcctgcatggtggatttgttttgggca

SEQ ID NO: 368 - DNA, 3453 bp, Homo sapiens
atgaagctgaaaaagcaggtgacagtgtgtggggctgccatcttctgtgtggcagtcttctcgctctacctcatgctggaccgagtgcaacacgatcccacccgacaccagaatggtgggaacttcccccggagccaaatttctgtgctgcagaaccgcattgagcagctggagcagcttttggaggagaaccatgagattatcagccatatcaaggactccgtgctggagctgacagccaacgcagagggcccgcccgccatgctgccctactacacggtcaatggctcctgggtggtgccaccggagccccggcccagcttcttctccatctccccgcaggactgccagtttgctttggggggccggggtcagaagccagagctgcagatgctcactgtgtcggaggagctgccgtttgacaacgtggatggtggtgtgtggaggcaaggcttcgacatctcctacgacccgcacgactgggatgctgaagacctgcaggtgtttgtggtgccccactctcacaatgacccaggctggatcaagacctttgacaagtactacacagagcagacccaacacatcctcaatagcatggtgtctaagctgcaggaggacccccggcggcgcttcctctgggcagaggtctccttcttcgccaagtggtgggacaacatcaatgtccaaaagagagcggcagtccgaaggctggtgggaaacgggcagctggagattgcgacaggaggctgggtgatgccagatgaggccaattcccactactttgcattgattgaccagctcatcgaaggacaccagtggctggagagaaatcttggtgcaaccccccgctctggctgggcagtggacccctttggatacagctccaccatgccttacctgctgcgccgtgccaacctcaccagcatgctgattcagagagtgcactatgccatcaagaagcactttgctgccacccacagcctagagttcatgtggaggcagacatgggactcggactccagcacagacatcttctgtcacatgatgcccttctacagctatgacgtcccccatacctgtggcccagatcccaagatctgctgccaatttgatttcaaacgcctgcctggtgggcgcatcaactgcccttggaaggtgccaccccgggccatcacagaggccaacgtggcagagagggcagccctgcttctggaccaataccggaagaagtcccagctgttccgaagcaacgtcctcctggtgcctcttggagatgacttccgatatgacaagccccaggagtgggatgcccagttcttcaactaccaacggctctttgacttcttcaacagcaggcctaacctccatgtgcaggcccagtttggcactctttctgactattttgatgccctgtacaagaggacaggggtggagccaggggcccggcctccagggtttcctgtgctgagcggggatttcttctcctatgcggaccgggaggatcattactggacaggctattacacttcccggcccttctacaagagcttagaccgagtcctggaagcccacctgcggggggcagaggttctgtacagcctggctgcagctcacgctcgccgctctggtctggctggccggtacccactgtctgatttcaccctcctgacggaagctcggcgcacattggggctcttccagcatcacgatgccatcactggcacggccaaggaggctgtggtggtggactatggggtcaggcttctgcgctcccttgtcaacctgaagcaggtcatcattcatgcagcccactatctggtgctgggggacaaggagacctaccactttgaccctgaggcgcccttcctccaagtggatgacactcgcttaagtcacgacgccctcccagagcgcacggtgatccagctggattcctcgcccaggtttgtggtcctattcaacccactggaacaggagcgattcagcatggtgtccctgctggtcaactctccccgcgtgcgtgtcctttcggaggagggtcagcccctggccgtgcagatcagcgcacactggagctctgccaccgaggcggtccctgacgtctaccaggtgtctgtgcctgtccgcctgccagccctgggcctgggcgtgctgcagctacagctgggcctggatgggcaccgcacgctgccctcctctgtgcgcatctacctgcacggccggcagctgtccgtcagcaggcacgaagcgtttcctctccgtgtcattgactctggcaccagcgacttcgccctcagcaaccgctacatgcaggtctggttctcaggccttactgggctcctcaagagcatccgaagggtggatgaggagcacgagcagcaggtggacatgcaggtccttgtctatggcacccgtacgtccaaagacaagagtggagcctacctcttcctgcccgatggcgaggccaagccctacgtccccaaggagccccccgtgctgcgtgtcactgaaggccctttcttctcagaggtggttgcgtactatgagcacattcaccaggcggtccggctttacaatctgccaggggtggaggggctgtctctggacatatcatccctggtggacatccgggactacgtcaacaaggagctggccctgcacatccatacagacatcgacagccagggtatcttcttcacagacctcaatggctttcaggtgcagccccgacggtatctgaagaagctccccctccaggccaacttctaccccatgccagtcatggcctatatccaggacgcacagaagcgcctcacgctgcacactgcccaggccctgggtgtctctagcctcaaagatggccagctggaggtgatcttggaccggcggctgatgcaggatgacaaccggggcctaggccaagggctcaaggacaacaagagaacctgcaaccgtttccgcctcctgctagagcggcgaaccgtgggcagtgaggtccaagatagccactctaccagctacccatccctcctcagccacctgacctccatgtacctgaacgccccggcgctcgctctgcctgtagccaggatgcagctcccaggccctggtctgcgctcatttcatcctctggcttcctcactgccctgtgacttccacctgctcaacctacgtacgctccaggctgaggaggacaccctaccctcggcggagaccgcactcatcttacaccgcaagggttttgactgcggcctggaggccaagaacttgggcttcaactgcaccacaagccaaggcaaggtagccctgggcagccttttccatggcctggatgtggtattccttcagccaacctccttgacgttactgtaccctctggcctccccgtccaacagcactgacgtctatttggagcccatggagattgctacctttcgcctccgcttgggttag

SEQ ID NO: 369 - DNA, 1122 bp, Homo sapiens
atgttgttgggactggcggccatggagctgaaggtgtgggtggatggcatccagcgtgtggtctgtggggtctcagagcagaccacctgccaggaagtggtcatcgcactagcccaagcaataggccagactggccgctttgtgcttgtgcagcggcttcgggagaaggagcggcagttgctgccacaagagtgtccagtgggcgcccaggccacctgcggacagtttgccagcgatgtccagtttgtcctgaggcgcacagggcccagcctagctgggaggccctcctcagacagctgtccacccccggaacgctgcctaattcgtgccagcctccctgtaaagccacgggctgcgctgggctgtgagccccgcaaaacactgacccccgagccagcccccagcctctcacgccctgggcctgcggcccctgtgacacccacaccaggctgctgcacagacctgcggggcctggagctcagggtgcagaggaatgctgaggagctgggccatgaggccttctgggagcaagagctgcgccgggagcaggcccgggagcgagagggacaggcacgcctgcaggcactaagtgcggccactgctgagcatgccgcccggctgcaggccctggacgctcaggcccgtgccctggaggctgagctgcagctggcagcggaggcccctgggcccccctcacctatggcatctgccactgagcgcctgcaccaggacctggctgttcaggagcggcagagtgcggaggtgcagggcagcctggctctggtgagccgggccctggaggcagcagagcgagccttgcaggctcaggctcaggagctggaggagctgaaccgagagctccgtcagtgcaacctgcagcagttcatccagcagaccggggctgcgctgccaccgcccccacggcctgacaggggccctcctggcactcagggccctctgcctccagccagagaggagtccctcctgggcgctccctctgagtcccatgctggtgcccagcctaggccccgaggtggcccccatgacgcagaactcctggaggtagcagcagctcctgccccagagtggtgtcctctggcagcccagccccaggctctgtga

SEQ ID NO: 370 - DNA, 1002 bp, Homo sapiens
aattcaggatacagcaccctcacctttgggaaggggactatgcttctagtctctccagatatccagaaccctgaccctgccgtgtaccagctgagagactctaaatccagtgacaagtctgtctgcctattcaccgattttgattctcaaacaaatgtgtcacaaagtaaggattctgatgtgtatatcacagacaaaactgtgctagacatgaggtctatggacttcaagagcaacagtgctgtggcctggagcaacaaatctgactttgcatgtgcaaacgccttcaacaacagcattattccagaagacaccttcttccccagcccagaaagttcctgtgatgtcaagctggtcgagaaaagctttgaaacagatacgaacctaaactttcaaaacctgtcagtgattgggttccgaatcctcctcctgaaagtggccgggtttaatctgctcatgacgctgcggctgtggtccagctgagatctgcaagattgtaagacagcctgtgctccctcgctccttcctctgcattgcccctcttctccctctccaaacagagggaactctcctacccccaaggaggtgaaagctgctaccacctctgtgcccccccggcaatgcaccaactggatcctacccgaatttatgattaagattgctgaagagctgccaaacactgctgccaccccctctgttcccttattgctgcttgtcactgcctgacattcacggcagaggcaaggctgctgcagctccgctggctgtgcacattccctcctgctccccagagactgcctccgccatcccacagatgatggatcttcagtgggttctcttgggctctaggtcccggagaatgttgtgaggggtttatttttttttaatagtgttcataaagaaagacatagtattcttcttctcaagacgtggggggaaattatctcattatcgaggccctgctatgctgtgtgtctgggcgtgttgtatgtcctgctgccg

SEQ ID NO: 371 - DNA, 4747 bp, Homo sapiens
gcttgagcctgtaccagaatgataagtggaaattagtcctcaaagtaacctcagctgtttcattattgtgtgcctcgagcatctggttattcaagctcctcccacggttcgtattgtgcactcaggcttggcctgtaacattgaagaggagcgctactccgaaagggtctacactatccgggaaggagaaacccttgagttgacttgtctagtcacaggacatccacgtccacaggtggaccaaaacagcaggaagtgcctctgacagattccaagactcaagtgtcttcaatgagactttgaggattacaaatattcagcgacaccaaggaggccggtattactgtaaagcagagaatggcttggggtctccagcgataaagtcaatcagagtggatgtatactatttggatgatccagtagtaactgttcatcaaagtataggtgaagctaaagaacaattttactatgagagaacagtgttcctccggtgtgttgccaattccaatcctcctgttcggtatagctggagacgtggccaggaggtcttgctgcaaggatctgataaaggagttgagatttatgaaccattctttacccagggtgaaacaaagatcttaaaactaaagaatcttcgacctcaggactatgctaattatagctgcattgcttcagtgaggaatgtatgtaatattcctgataagatggtgtcgtttagactgtccaataaaacagcatcaccgtcaattaaactcttggtggatgatcctatagttgtaaatcctggagaggccataacattagtatgtgttacaacaggaggagagcctgcaccttctctcacctgggtcaggtcctttgggactctgcctgaaaagactgttttgaatggaggaactttgaccatacctgccatcacctcagatgatgctggtacttacagctgcattgccaataataatgtgggaaaccctgcaaaaaagtccaccaacatcattgtgagagcattaaaaaaaggacgattttggatcacaccagatccttatcacaaagatgacaacatccagattggccgtgaggtgaaaatatcttgccaagtagaagctgttccttctgaggagctaacatttagttggtttaaaaatggtcgtccattaagaagttctgagcggatggtcattacacagactgatcctgatgtctctccgggaacaacaaacttggacatcattgatttaaaattcacggattttgggacgtacacatgtgtagcatctctgaagggaggaggaatatctgatatcagtatcgatgttaatatatccagcagcacagttccacccaatctgactgttccacaggaaaaatcaccattggtcaccagagaaggagacacaatagaactgcaatgtcaagtaactggcaaacctaaaccaatcatcctttggtctagagcggataaagaagttgcaatgcctgatggatcaatgcaaatggagagttatgatggaacactgaggattgtgaatgtatctagggaaatgtcaggaatgtacagatgtcagaccagccaatacaatggatttaacgtgaaaccaagggaagccttggtgcagctcatcgttcagtatccccctgcagtggaaccagcattcttggaaatccggcaaggacaggatcgaagtgtcactatgagttgcagagtactgagagcctatccaatacgggtgctgacctatgagtggcgcttgggcaataaattattacggacgggtcaatttgactctcaggaatacacagagtacgctgtgaagagtctttccaatgaaaactatggggtttataactgtagcatcataaatgaagctggagctgggagatgcagctttcttgttacaggaaaggcctatgctccagaattctattatgatacctacaatccagtatggcagaacagacaccgtgtttattcttacagtctacagtggacacagatgaatcctgatgcagtggatcggattgttgcataccggttgggcatcaggcaggctggacagcagcgctggtgggagcaggagattaaaataaatgggaatattcaaaagggagaattaattacatataacttgacagagctaattaaaccagaagcttatgaagtccgactgactcctctcaccaaatttggtgaaggagattcaacaattcgtgtgatcaaatatagtgctcctgtaaatcctcatttgagagaatttcattgtggatttgaagatggtaatatttgtttgttcactcaagatgatacagataattttgactggacaaagcaaagtacagcaacaagaaatacaaaatatactcctaatacaggacctaatgctgaccgtagtggctccaaagaaggtttttatatgtacattgagacatcacgacccagattggaaggcgaaaaggctcgacttctcagccctgttttcagcatagctcccaaaaacccttatggacccacaaacactgcatattgtttcagcttcttttatcacatgtatggacaacatataggtgtcttaaatgtttatctacgtttgaaagggcaaacaacaatagagaatccactgtggtcttcaagtgggaataaaggacaaagatggaatgaggctcatgttaatatatacccaattacttcatttcagctcatttttgaaggtatccgaggtcctggaatagaaggtgacattgctattgatgatgtatcaattgcagaaggagaatgtgcaaaacaagacctagcaactaagaattccgttgatggtgctgttgggattttggttcatatatggctttttcccattatcgtcctcatctctatcttaagtcctcgaaggtgaccttatcctggcagaggctataaaagattcaccaggcactggcatgaagaaagagtctttgtaaatggacattgaacaaacaaactaccaaagattcctccactgactactgactcaaaaataaaataataaaaacaaatttttttaagcactggggataaaaagacatcatggaagtataacttattccagactaaacataaaagataatcttgacctgagtagagaagagaccttcaggtgcttttgtggctaaaaagattacagcgtcatctggttgaactctggaaaaaaaaaaaaaaatgaaaaaaagaaaaaaaaaagagctatagaaatccttgtcaaagcacaaagtcatggctggttttgtttcaaatgaatagtttgcttgttaccatggaaacctaatggcctgccaacaaaaacctcactgtaaacagggtacgtgaagagctggcatttattttccttacgagaaggttttcgtagagaattaaataaatgtaggcccttttacctttggctgttacccttccttgaaaataacccgaactcagaattatttaaagcattcatgtttctccccaccttatccccatcccacctttattattattatttttctcccgtggctaagctagataactgtatgctgtctctttttgcatgcactactatccaggatggtaaacctgggcttacatgttacacaggcttatcggagtttgcttgcggccacttgaacacccaaactacgtcatctgttccaatgaagaaaccaaaccaccatcttttataaattgccatggaaaccaagtgccttcaatgaaacaagcctgaataattttcaactcagaagcttgcactgctaagagtggtttgtgtaaaactattttataaacaaactacagagcctaaatgtgcaaattacaggcaagacaacaaagccgcttctgaagaagaaaggaccgaagctgctgcgtaagcccatgcagacaagatatttgttgtttaacctcctagacagccatggcctttcggcttattgtccattagaaaatcacttccattgagaccagacatggagcaacactttttttcttccaggttattaaatgggtcaaccagagcaaaaggttattaagaatacttagtgcagaaggtggtaaaacacaaaagtgatttttttactctaacctccatttgaaatgaaattggccctagctttagagggaacaagaaaatgtttgggattgcagtgcatactaactctacagtggaactgggcctgaaaaatctggctttattctaaactctgagggtaatatgcctctgccctttagtcagactctgtgcaaattgtgaaatattattttattattttaccaagattataaaaacacttttacaaaaaaacaaaaacctgtaaaaataattttgagctacctgacgacaaatcatatctttaaccagccagttttccaatgcattgtaaatttcacttaaacctgttggttatgaaaatttgaagatcattttccttaaattatctcagcttttaacttcatttaaaaagacttttgtctaagaagaatattattattatatgttctttcaacaccccaggattaaaaaaactgattatgcaagcaattggaatataagtattaaattatagcatttgcaaatattaatataaaagcacaacaaaatgtagtggaaaatgacaaagcttgttttttaaaacaattctgtagaaatgtttgtgcaaattcagtaattcaacttaaaatataattttacagctatgttcaataaagcctctttccaggtaaggtaaaaaaaaaaaaaaaaaaaaa

SEQ ID NO: 372 - DNA, 1637 bp, Homo sapiens
ggcaagacgcctcttcagttgtctgctactcagaggaaggggcggttggtgcggcctccattgttcgtgttttaaggcgccatgaggggtgacagaggccgtggtcgtggtgggcgctttggttccagaggaggcccaggaggagggttcaggccctttgtaccacatatcccatttgacttctatttgtgtgaaatggcctttccccgggtcaagccagcacctgatgaaacttccttcagtgaggccttgctgaagaggaatcaggacctggctcccaattctgctgaacaggcatctatcctttctctggtgacaaaaataaacaatgtgattgataatctgattgtggctccagggacatttgaagtgcaaattgaagaagttcgacaggtgggatcctataaaaaggggacaatgactacaggacacaatgtggctgacctggtggtgatactcaagattctgccaacgttggaagctgttgctgccctggggaacaaagtcgtggaaagcctaagagcacaggatccttctgaagttttaaccatgctgaccaacgaaactggctttgaaatcagttcttctgatgctacagtgaagattctcattacaacagtgccacccaatcttcgaaaactggatccagaactccatttggatatcaaagtattgcagagtgccttagcagccatccgacatgcccgctggttcgaggaaaatgcttctcagtccacagttaaagttctcatcagactactgaaggacttgaggattcgttttcctggctttgagcccctcacaccctggatccttgacctactaggccattatgctgtgatgaacaaccccaccagacagcctttggccctaaacgttgcatacaggcgctgcttgcagattctggctgcaggactgttcctgccaggttcagtgggtatcactgacccctgtgagagtggcaactttagagtacacacagtcatgaccctagaacagcaggacatggtctgctatacagctcagactctcgtccgaatcctctcacatggtggctttaggaagatccttggccaggagggtgatgccagctatcttgcttctgaaatatctacctgggatggagtgatagtaacaccttcagaaaaggcttatgagaagccaccagagaagaaggaaggagaggaagaagaggagaatacagaagaaccacctcaaggagaggaagaagaaagcatggaaactcaggagtgacattcccttcactccttttcctacccaagggggaagactggagcctaagctgcctgctactgggctttacatggtgacagacatttccgtgggatagggaagatagcaggaagaaaagtaaactccatagaagtgtcattccactgggttttgatattggcttagctgccagtctcccatttgtgacctatgccatccatctataatggaggataccaacatttcttcctaatattctataatctccaactcctgaaaacccctctctcaactaatactttgctgttgaaatgttgtgaaatgttaagtgtctggaaatttttttttctaagaaaaactattaaagtacttcctagtaaaaaaaaaaaaaaaaaaaaaaaaaa

SEQ ID NO: 373 - DNA, 5297 bp, Homo sapiens
gtctgcctccgggttgcacgaagagtccgagtcatttctcagaaggttttgataggtgggccttagaggagacgccgccgagcaccgcaagaactggaaaacacacccctctctgtctgcctgggagagccacggaaattggcacttctctgagtgaagctgaggagaaggctgtaaatctgccaaaacagccttgaagtattcttttgtcatgaggaagtgacggctgctggagggaggtgaacaccacaaggagagatggcatctggcctgggccccgcctagcagcagctccacctcctaggccaggccctgtgggatgcgccactagaccaccatggacggatcccacagcgcagccctgaagctgcagcagctgcctcccacaagtagctccagcgccgtaagcgaggcctccttctcctacaaggaaaacctgattggcgccctcttggcgatcttcgggcacctcgtggtcagcattgcacttaacctccagaagtactgccacatccgcctggcaggctccaaggatccccgggcctatttcaagaccaagacatggtggctgggcctgttcctgatgcttctgggcgagctgggtgtgttcgcctcctacgccttcgcgccgctgtcactcatcgtgcccctcagcgcagtttctgtgatagctagtgccatcataggaatcatattcatcaaggaaaagtggaaaccgaaagactttctgaggcgctacgtcttgtcctttgttggctgcggtttggctgtcgtgggtacctacctgctggtgacattcgcacccaacagtcacgagaagatgacaggcgagaatgtcaccaggcacctcgtgagctggcctttccttttgtacatgctggtggagatcattctgttctgcttgctgctctacttctacaaggagaagaacgccaacaacattgtcgtgattcttctcttggtggcgttacttggctccatgacagtggtgacagtcaaggccgtggctgggatgcttgtcttgtccattcaagggaacctgcagcttgactaccccatcttctacgtgatgttcgtgtgcatggtggcaaccgccgtctatcaggctgcgtttttgagtcaagcctcacagatgtacgactcctctttgattgccagtgtgggctacattctgtccacaaccattgctatcacagcaggtgcaatattttacctggacttcatcggggaggacgtgctgcacatctgcatgtttgcactggggtgcctcattgcattcttgggcgtcttcttaatcacgcgtaacaggaagaagcccattccatttgagccctatatttccatggatgccatgccaggtatgcagaacatgcacgataaagggatgactgtccagcctgaacttaaagcttctttttcctatggggctctggaaaacaatgacaacatttctgagatctacgctcctgccaccctgccagtcatgcaagaagagcacggctccagaagtgcctctggggtcccctaccgagtcctagagcacaccaagaaggaatgagactcgcctccctctatttataactgtcccctccaggctgacagtggttcaaccctgaatcctaaaacttgcctttcaagtctcattttgtttctaactgagaactctatggatgatgatctcaaaaagcctttgtctctgggaaaggatgcgttatcttggtcttggaaatttcaaatgatgagggttgggggatggaagcattattccaggtggacgggatagaatccagcctctgcctggattagcccagggggatttggaaagcctttctaccatccttgaggatggtaactgagcttcctctgacagtgaccaaaggatgctgtatccttcagagctaaggcaagacagagagtctgctgttaattctcaaatccagcgaaaggctagacatctctaaatctcgtcttcctccacctcatgtgcatgcctgatctcaccctgacactcctgatgccgcatctgtgatagcactcgtgttgccttcacatggcaggctgggccaaccctgggtggaaggttctgacatttgtgttttcagaaatgtacatctgccttccagtcatctgtgcccttctagggaagatgtgcttgatatgttcaaattggatctactctgaaaacgaaacttggttttggtcctgtgaggactacttgtttgtccacctcctccaccaaaggaattaggaagttaagagaaggggaagaatatggaggataggagagggtgatgatgctttagcccattaaggaagaaaagttccccttactcttacaaaaggtgattgcaccacttaaaaaaggataggtagaaaatctggccattttatgtgttatttttttcctgcataccagtgccccctggaaagatggggatgctcatttcagagacagcctcttcacctgtcctccgtctctccattacagagccacaagccaagcttgagttactggttaatttccttgaagtcaatagagactctctgggtcctcatccccatgcatatatgtctgggagaagcaagcattctccaaaacagggctgttgctttcttcctggccgcatatgtgactgtcttcccctagactgatggtatacttttgagaggggcggataaaggtttgcaaactttaatgggcataaggatcccctagaagcatatgtaaaatgcagattcctgcaccccaactgcagacactgttaagtgggactggagtggggcccacgggtctgcattcttaactggtaccaccagtgattctgatgcgatgcttcaatcccgagatttcacatctggaaagcctaagaatttacaaagatgttctgctaaaacccccagggccccatgcagtcttgctagaaaatttcctccctagggttcctttggaaggttaaatactccccataggatctgtggcatttctccatccaatgaatactacttagagctacactcaccacttccctagacagcctttaataggcatgataacagtgttaatagaccagtgtgatagatcacttatctttatggattgtgcttaatactgatttagtatcttgactccaaaaactgacatctgttgtctgtgataaccacttctgtattgcgtcttaaccacttctgtattgtgtggtcttaactgcctaaggcggcaatgggcagtgggcccctttcccttaggatgggtatcaattcaacaatatttataaggcatttactgtgtgctaagcatttggaagacccaggctacaaaataagacatagttcctgccctccaggccagcagagggaggcacaaatacccaggaatctctgatgggtgtgaagtgcggtcgtgggccacagaaaatgaccgtcatggagaccctgctaaaggtcggaccctgagcccaaaggggtattcagaagtggagatgattttggccccactcatagatgggtggcaaatctaagatttgtataaagcatataaaatagggtgatcacccccgaggcagaggggccagcatttgcaaaggcacagagctaagaggagctgggcaaagaaaggaaacccagggaaggtggtgggagatgagtctcaaagctaagtagtggaagctgggcacagtggctcatgcctgcaatcccagcactttgggaggccaaggctggaggatcacttgagcccaggagttttatatcagcctgggcaacatagcaagacctcatctctgctaaaaattaaaaataaataaattagctgggtgtggtggtgcatgcctgtgatcctagctactcaggaggctgaggtgggaggatcgctagagcccagagaaccaaggctacagtgagccatgatcatgctactgcactccagcctgggtgacaatgagaccatggctcaaaaaaaaaaaaaaaaaaaagataagcagtggaggccgaatcatggagggtcttgaatacctggctaaggagtttaaagtgtatccaagaggacgtgggagccactgatggttcatgaggaagagaagggcaggaccagcactgattgaaaaggagggcttgttcagtgtggaggaagaatcagaagggggaataagttaccttctccgagcctgcaagaacaaaaaacaaaaagcagaaattaaaatcaggtttcactgctatttatatatttctcctttcccaaatgatttttctaaagctgggagtggaggcaggagggagaaacagaaggtgagcagggaggctatttagatgtgtcaaacccgggtgatcattaataatttgggcatatatatgctcccaaacttactctgcccccttccttccctttttttttttttttttttggtatgggccttttaggcttgggccagccagctttcttgagatgagtgaataaaagcgtattgtaatttcatgtctgcttcagatcatggggacagtgccacccaggaactgctgctgaggcctgggaagctcccttgccttcgggtttggagcagtggcatcatcccaccaacctgagtcatgaaagggctgagcagaaagttaaatggtagtttcctgactggaagccacacgtaggtcacttgagtagtcaggaagcacagtgggtgtggagccatcatctgtcttgggctggttcctcccaatctttgtccagtggtataaatggactgtctgctgatggccatacgcagcactggctgttaagatggggaaggggtacatcaggattccactcatagccctggttcgttattgttactcatggctctgacgtccccaagccctcttgaatgttgcaagcaatgttaaatatcacacctcggtctccttttgagcagcccaggtacctaaagcaaggtcaccaaacttgggtttaaacttcagttgccatcacagcagggttcaggttatgcagtttttgcagtgtggagttgaacgctgggtaaagaagggagagctgactctccattgcttttctagtggaaaccagccagtttgacggcacggtgcggatacaggactccatcaggctagtgttggggaaccagcccggcagccttccatgtgaattccaaagctgtttcaacactggctgataggcagacaaaaggttacttgtgtgtttctctgagaagcggtgtaaaggaagtcaccttagaatatattctgtgcggatgcttatattttgttaacttcacgacttatggcatgtcttatttaaaaaaaaaaaaaaa

SEQ ID NO: 374 - DNA, 3072 bp, Homo sapiens
atggggaagggggttggacgtgataagtatgagcctgcagctgtttcagaacaaggtgataaaaagggcaaaaagggcaaaaaagacagggacatggatgaactgaagaaagaagtttctatggatgatcataaacttagccttgatgaacttcatcgtaaatatggaacagacttgagccggggattaacatctgctcgtgcagctgagatcctggcgcgagatggtcccaacgccctcactccccctcccactactcctgaatggatcaagttttgtcggcagctctttggggggttctcaatgttactgtggattggagcgattctttgtttcttggcttatagcatccaagctgctacagaagaggaacctcaaaacgataatctgtacctgggtgtggtgctatcagccgttgtaatcataactggttgcttctcctactatcaagaagctaaaagttcaaagatcatggaatccttcaaaaacatggtccctcagcaagcccttgtgattcgaaatggtgagaaaatgagcataaatgcggaggaagttgtggttggggatctggtggaagtaaaaggaggagaccgaattcctgctgacctcagaatcatatctgcaaatggctgcaaggtggataactcctcgctcactggtgaatcagaaccccagactaggtctccagatttcacaaatgaaaaccccctggagacgaggaacattgccttcttttcaaccaattgtgttgaaggcaccgcacgtggtattgttgtctacactggggatcgcactgtgatgggaagaattgccacacttgcttctgggctggaaggaggccagacccccattgctgcagaaattgaacattttatccacatcatcacgggtgtggctgtgttcctgggtgtgtctttcttcatcctttctctcatccttgagtacacctggcttgaggctgtcatcttcctcatcggtatcatcgtagccaatgtgccggaaggtttgctggccactgtcacggtctgtctgacacttactgccaaacgcatggcaaggaaaaactgcttagtgaagaacttagaagctgtggagaccttggggtccacgtccaccatctgctctgataaaactggaactctgactcagaaccggatgacagtggcccacatgtggtttgacaatcaaatccatgaagctgatacgacagagaatcagagtggtgtctcttttgacaagacttcagctacctggcttgctctgtccagaattgcaggtctttgtaacagggcagtgtttcaggctaaccaggaaaacctacctattcttaagcgggcagttgcaggagatgcctctgagtcagcactcttaaagtgcatagagctgtgctgtggttccgtgaaggagatgagagaaagatacgccaaaatcgtcgagatacccttcaactccaccaacaagtaccagttgtctattcataagaaccccaacacatcggagccccaacacctgttggtgatgaagggcgccccagaaaggatcctagaccgttgcagctctatcctcctccacggcaaggagcagcccctggatgaggagctgaaagacgcctttcagaacgcctatttggagctggggggcctcggagaacgagtcctaggtttctgccacctctttctgccagatgaacagtttcctgaagggttccagtttgacactgacgatgtgaatttccctatcgataatctgtgctttgttgggctcatctccatgattgaccctccacgggcggccgttcctgatgccgtgggcaaatgtcgaagtgctggaattaaggtcatcatggtcacaggagaccatccaatcacagctaaagctattgccaaaggtgtgggcatcatctcagaaggcaatgagaccgtggaagacattgctgcccgcctcaacatcccagtcagccaggtgaaccccagggatgccaaggcctgcgtagtacacggcagtgatctaaaggacatgacctccgagcagctggatgacattttgaagtaccacactgagatagtgtttgccaggacctcccctcagcagaagctcatcattgtggaaggctgccaaagacagggtgctatcgtggctgtgactggtgacggtgtgaatgactctccagctttgaagaaagcagacattggggttgctatggggattgctggctcagatgtgtccaagcaagctgctgacatgattcttctggatgacaactttgcctcaattgtgactggagtagaggaaggtcgtctgatctttgataacttgaagaaatccattgcttataccttaaccagtaacattcccgagatcaccccgttcctgatatttattattgcaaacattccactaccactggggactgtcaccatcctctgcattgacttgggcactgacatggttcctgccatctccctggcttatgagcaggctgagagtgacatcatgaagagacagcccagaaatcccaaaacagacaaacttgtgaatgagcggctgatcagcatggcctatgggcagattggaatgatccaggccctgggaggcttctttacttactttgtgattctggctgagaacggcttcctcccaattcacctgttgggcctccgagtggactgggatgaccgctggatcaacgatgtggaagacagctacgggcagcagtggacctatgagcagaggaaaatcgtggagttcacctgccacacagccttcttcgtcagtatcgtggtggtgcagtgggccgacttggtcatctgtaagaccaggaggaattcggtcttccagcaggggatgaagaacaagatcttgatatttggcctctttgaagagacagccctggctgctttcctttcctactgccctggaatgggtgttgctcttaggatgtatcccctcaaacctacctggtggttctgtgccttcccctactctcttctcatcttcgtatatgacgaagtcagaaaactcatcatcaggcgacgccctggcggctgggtggagaaggaaacctactattag

SEQ ID NO: 375 - DNA, 237 bp, Homo sapiens
atgtctgagtcggagctcggcaggaagtgggaccggtgtctggcggatgcggtcgtgaagataggtactggttttggattaggaattgttttctcacttaccttctttaaaagaagaatgtggccattagccttcggttctggcatgggattaggaatggcttattccaactgtcagcatgatttccaggctccatatcttctacatggaaaatatgtcaaagagcaggagcagtga

SEQ ID NO: 376 - DNA, 1395 bp, Homo sapiens
atgtattccaatgtgataggaactgtaacctctggaaaaaggaaggtttatcttttgtccttgctgctcattggcttctgggactgcgtgacctgtcacgggagccctgtggacatctgcacagccaagccgcgggacattcccatgaatcccatgtgcatttaccgctccccggagaagaaggcaactgaggatgagggctcagaacagaagatcccggaggccaccaaccggcgtgtctgggaactgtccaaggccaattcccgctttgctaccactttctatcagcacctggcagattccaagaatgacaatgataacattttcctgtcacccctgagtatctccacggcttttgctatgaccaagctgggtgcctgtaatgacaccctccagcaactgatggaggtatttaagtttgacaccatatctgagaaaacatctgatcagatccacttcttctttgccaaactgaactgccgactctatcgaaaagccaacaaatcctccaagttagtatcagccaatcgcctttttggagacaaatcccttaccttcaatgagacctaccaggacatcagtgagttggtatatggagccaagctccagcccctggacttcaaggaaaatgcagagcaatccagagcggccatcaacaaatgggtgtccaataagaccgaaggccgaatcaccgatgtcattccctcggaagccatcaatgagctcactgttctggtgctggttaacaccatttacttcaagggcctgtggaagtcaaagttcagccctgagaacacaaggaaggaactgttctacaaggctgatggagagtcgtgttcagcatctatgatgtaccaggaaggcaagttccgttatcggcgcgtggctgaaggcacccaggtgcttgagttgcccttcaaaggtgatgacatcaccatggtcctcatcttgcccaagcctgagaagagcctggccaaggtagagaaggaactcaccccagaggtgctgcaagagtggctggatgaattggaggagatgatgctggtggtccacatgccccgcttccgcattgaggacggcttcagtttgaaggagcagctgcaagacatgggccttgtcgatctgttcagccctgaaaagtccaaactcccaggtattgttgcagaaggccgagatgacctctatgtctcagatgcattccataaggcatttcttgaggtaaatgaagaaggcagtgaagcagctgcaagtaccgctgttgtgattgctggccgttcgctaaaccccaacagggtgactttcaaggccaacaggcctttcctggtttttataagagaagttcctctgaacactattatcttcatgggcagagtagccaacccttgtgttaagtaa

SEQ ID NO: 377 - DNA, 1473 bp, Homo sapiens
atgaacggagctttggatcactcagaccaaccagacccagatgccattaagatgtttgtcggacagatcccccggtcatggtcggaaaaggagctgaaagaactttttgagccttacggagccgtctaccagatcaacgtcctccgggaccggagtcagaaccctccgcagagtaaaggttgttgtttcgtaacattttatacaagaaaagctgcacttgaggcccagaatgcactgcacaatattaaaactttacctgggatgcatcatcccattcagatgaaacctgcagatagtgaaaagtccaacgctgtggaagacagaaaattgttcataggaatggtatcgaagaaatgtaatgagaacgacatcagggtgatgttctctccatttggccagatagaagaatgccggatcctccggggacctgatgggctgagtcgaggctgtgcgtttgtcacattttctacaagggcaatggcacagaatgcaatcaaagccatgcatcagtctcagaccatggagggctgctcttcacctatcgtggtgaagtttgctgacactcagaaggacaaagagcaaaggcgcctccagcagcagctcgctcagcagatgcagcagctcaacactgccacctgggggaacctgacagggctgggcggactgaccccacagtatctggcgctcctgcagcaggccacctcctccagcaacctgggtgcgttcagcggcattcaacaaatggcaggcatgaatgctttacagttgcagaacctggcgacgctggctgctgctgcagctgcggcccagacctcagccaccagcaccaatgcaaaccctctctctaccacgagcagcgccctgggagccctcacgagtcccgtggctgcttcaacccccaactccactgctggtgcagccatgaactccttgacctctctcgggactctgcaaggactggctggagccactgttggactgaataatattaatgcactagcagttgctcaaatgctctcaggtatggcggctctgaatggaggacttggcgccacaggcttgacgaatggcacggctggcaccatggacgccctcacccaggcctactcaggaattcaacagtacgcagccgccgcgctgcccactctgtacagccagagcctgctgcagcagcagagcgctgcaggcagccagaaggaaggtccagagggggcaaacctctttatttaccaccttccacaggaatttggagaccaggacattctgcagatgttcatgccttttggaaatgttatctctgctaaagtcttcattgacaaacagaccaatctgagcaagtgctttggttttgttagctacgacaatccagtctctgcacaagctgctatccaagctatgaatggctttcagatcggcatgaaacgcttgaaggtgcagctgaagcgttccaaaaacgacagcaaaccttactga

SEQ ID NO: 378 - DNA, 791 bp, Homo sapiens
ggtgaaatgtgccgaggtctctccagaggtggtaggcggttgcgccagcttcacatcctggataggcaggaacgtttccctatcatactcctgtcccgggtctcatgtgtctcagttcaaacagacactgccgtctatcttcaagctgcaatgaagctgagagccacagaaaacacctgtaccatggtttcagggaggagtctcttccctcagccgaaaacagacagctttgctggtcatctgttctccactgcgaggacgctgccactcagtgtggagagaggaaggggttctgcctatggtgcaagaaggtcggactcggcagttgcccctggtgaccagtcatctccattatgtagctatggctcgcagttaatactcttggataatgtatttaaggatgcttaagaaattgcaacagccagttcaaccttcagcaaccaccatactgatcagtagtcatcaacattgagacgagactgtacaccagcaaaaagatcccaactcaatgaaggctcagatgattttagcatttttttagcaataaagcatttttaaattaaactatatacattgttgttttagacaagtttttgcacattcagaatacagtaaagtgtaaacatgacttttatatacactggggaaaccaaaaaatttgtgtgacttactttattgcaatatttgttttattgtgctgatctggagctaaatatatctgagatatgcttgtactgatgattattttaacaccaagatattttaaaattcattaaataaatgtttattta

SEQ ID NO: 379 - DNA, 1245 bp, Homo sapiens
gctggaggttgattggcggtcttgccggccagtgaagccagggcatgggcggggcgcggctcggagcgcgaaacatggcggggcaggacgctggctgcggccgtggcggcgacgactactcagaggacgagggcgacagcagcgtgtccagggcggctgtggaggtgttcgggaagctgaaggacctaaactgccccttcctcgagggtctgtatatcacagagccaaagacaattcaggaactgctgtgcagcccctcagagtaccgcttggagatcctagagtggatgtgtacccgggtctggccctcactgcaggacaggttcagctcactgaaaggggtcccaacagaggtgaagatccaagaaatgacgaagctgggccacgagctgatgctgtgtgcgccagatgaccaggagctcctcaagggctgtgcctgcgcccagaagcagctacacttcatggaccagttgctcgataccatccggagcctgaccattgggtgctccagttgctcgagcctgatggagcacttcgaggacaccagggagaagaacgaggccttgctgggggagctcttctctagcccccacctgcagatgctcctgaatccagagtgcgacccgtggcccctggacatgcagcccctcctcaacaagcagagtgatgactggcagtgggccagtgcctctgccaagtccgaggaggaggagaagctggcggagcttgccaggcagctgcaggagagtgctgccaagttgcacgcgcttagaacggagtctacgacgacgagctgggcgagtgctgccagcgcccaggccctgacctccacccgtgcggccccatcatccaggccacgcaccagaatctgacttcctacagccaactgctgcaagtggtcatggcagttgctgacacctctgcgaaggccgtggagaccgtgaagaagcagcaaggcgagcagatctgctggggtggcagcagctccgtcatgagtctagctaccaagatgaatgaactaatggagaaatagaaagtcttcagtgatggcctacgccaaagcacaggatggggcgggcaggaagccctctcccaagatcgagttggccgaggatggatgattgtggcagcagaagccgttgcagccccacgttgtgctctaggcagggacctttggcccctttggggagggagagacagacgggcggtttgacttggacacaaagaaagccttggtttctaagc

SEQ ID NO: 380 - DNA, 2322 bp, Homo sapiens
gggagggggtgggatgggtggggggtaacgggggaaactggggaagtggggaaccgaggggcaaccaggggaagatggggtgctggaggagagcttgtgggagccaaggagcaccttggacatctggagtctggcaggagtgatgacgggtggaggggctagctcgaggcagggctggtggggcctgaggccagtgaggagtgtggagtaggcgcccaggcatcgtgcagacagggcgacatcagctggggacgatgggcctgagctagggctggaaagaagggggagccaggcattcatcccggtcacttttggttacaggacgtggcagctggttggacgaggggagctggtgggcagggtttgatcccagggcctgggcaacggaggtgtagctggcagcagcgggcaggtgaggaccccatctgccgggcaggtgagtcccttccctccccaggcctcgcttccccagccttctgaaagaaggaggtttaggggatcgagggctggcggggagaagcagacaccctcccagcagaggggcaggatgggggcaggagagttagcaaaggtgacatcttctcggggggagccgagactgcgcaaggctggggggttatgggcccgttccaggcagaaagagcaagagggcagggagggagcacaggggtggccagcgtagggtccagcacgtggggtggtaccccaggcctgggtcagacagggacatggcaggggacacaggacagaggggtccccagctgccacctcacccaccgcaattcatttagtagcaggcacaggggcagctccggcacggctttctcaggcctatgccggagcctcgagggctggagagcgggaagacaggcagtgctcggggagttgcagcaggacgtcaccaggagggcgaagcggccacgggaggggggccccgggacattgcgcagcaaggaggctgcaggggctcggcctgcgggcgccggtcccacgaggcactgcggcccagggtctggtgcggagagggcccacagtggacttggtgacgctgtatgccctcaccgctcagcccctggggctggcttggcagacagtacagcatccaggggagtcaagggcatggggcgagaccagactaggcgaggcgggcggggcggagtgaatgagctctcaggagggaggatggtgcaggcaggggtgaggagcgcagcgggcggcgagcgggaggcactggcctccagagcccgtggccaaggcgggcctcgcgggcggcgacggagccgggatcggtgcctcagcgttcgggctggagacgaggccaggtctccagctggggtggacgtgcccaccagctgccgaaggccaagacgccaggtccggtggacgtgacaagcaggacatgacatggtccggtgtgacggcgaggacagaggaggcgcgtccggccttcctgaacaccttaggctggtggggctgcggcaagaagcgggtctgtttctttacttcctccacggagtcggcacactatggctgccctctgggctcccagaacccacaacatgaaagaaatggtgctacccagctcaagcctgggcctttgaatccggacacaaaaccctctagcttggaaatgaatatgctgcactttacaaccactgcactacctgactcaggaatcggctctggaaggtgaagctagaggaaccagacctcatcagcccaacatcaaagacaccatcggaacagcagcgcccgcagcacccaccccgcaccggcgactccatcttcatggccaccccctgcggcggacggttgaccaccagccaccacatcatcccagagctgagctcctccagcgggatgacgccgtccccaccacctccctcttcttctttttcatccttctgtctctttgtttctgagctttcctgtctttccttttttctgagagattcaaagcctccacgactctgtttcccccgtcccttctgaatttaatttgcactaagtcatttgcactggttggagttgtggagacggccttgagtctcagtacgagtgtgcgtgagtgtgagccaccttggcaagtgcctgtgcagggcccggccgccctccatctgggccgggtgactgggcgccggctgtgtgcccgaggcctcaccctgccctcgcctagtctggaagctccgaccgacatcacggagcagccttcaagcattccattacgccccatctcgctctgtgcccctccccaccagggcttcagcaggagccctggactcatcatcaataaacactgttacagcaaaaaaaaaaaaaaaa

SEQ ID NO: 381 - DNA, 427 bp, Homo sapiens
ctttcattaggtctttttattttttgcaagaggaatcttctctcagagattccagtagacttcccatcatcatcttacacatacattcctaaacaaatcactagaaagagttaccatattttatttggaagaatcaagactcatgactcatgccctaatacttccaagatgcgcagcctttcttgaagcctagggctattaactgaaatagtcaattatgaaaaaaagttagggatgatgactcttggttaggtgatgggcagtgtgtagacagcactcttccaggtatgaaatgatttatccttcatgtgtacagctccactttgctgccttgagtcttttaataaaataggtatgtgcccccatatatgcgcatgcctgtgtatatatacatagatatgtgtacataaagataatatatatatat

SEQ ID NO: 382 - DNA, 2583 bp, Homo sapiens; identical to SEQ ID NO: 255

SEQ ID NO: 383 - DNA, 510 bp, Homo sapiens
atgatctgcctggtgctgaccatcttcgctaacctcttccccgcggcctgcaccggcgcacacgaacgcaccttcctggccgtgaagccggacggcgtgcagcggcggctggtgggcgagattgtgcggcgcttcgagaggaagggcttcaagttggtggcgctgaagctggtgcaggcctccgaggagctgctgcgtgagcactacgccgagctgcgtgaacgcccgttctacggccgccttgtcaagtatatggcctccgggccggtggtggccatggtatggcaggggctggacgtggtgcgcacctcgcgggcgctcatcggagccacgaacccggccgacgccccgcccggcaccatccgcggggatttctgcatcgaggttggcaagaacctgattcacggcagcgactcggtggagagtgcccgccgcgagatcgctctctggttccgcgcagacgagctcctctgctgggaggacagcgctgggcactggctgtatgagtag

SEQ ID NO: 384 - DNA, 2319 bp, Homo sapiens
gcgcctctccggagatggtctgaggtgggagaagagctgaagagacctggagccgacagacgggtctgggtctgccgcccaggatggagtacaatggtgtgatcttggctctttgcaacctctgcctcctgggctcaagccttcctcccacctgaacctcccaagtagcgggactgcagggtgaaggccatgccgcctcctgggaaagttccccgaaaggagaatctgtggctacagtgtgagtgggggtcctgctcctttgtgtgctcaaccatggaaaagttctttgagcatgtcactcagcacctgcagcagcacctgcatggctctggggaggaggaggaagaggaagaggaggatgacccacttgaggaagaattctcctgcttgtggcaggaatgtggcttttgttctctggacagttctgctgacctcatccgccatgtctacttccactgctaccacaccaagctgaaacagtgggggctgcaggccttgcaaagccaggctgaccttggcccctgcatcctggacttccagagccggaacgtcatccctgatatccctgaccacttcctgtgtctgtgggagcactgtgagaattccttcgacaatcctgagtggttttatcggcatgtggaagcacacagtctgtgctgtgaatacgaagcagtcggcaaggacaacccggtggtgctgtgtggctggaaaggctgtacctgcaccttcaaggaccgcagtaaacttcgagagcacctccgcagccatacccaggagaaagtggtagcctgccccacctgtgggggcatgtttgccaacaataccaagttcttagatcacatccgtcgccagacctcattggatcagcagcacttccagtgttctcactgttccaagagatttgccacagagcggctattgcgggaccacatgcgcaaccatgtgaatcactataagtgccctctgtgtgacatgacctgcccgctgccttcctccctccgcaaccacatgcgctttcgtcacagtgaggaccggccctttaaatgtgactgttgtgactacagctgcaagaatcttattgacctccagaagcacctggatacccacagcgaggagccagcctacaggtgtgattttgagaactgcaccttcagtgcccgatccctctgctctatcaagtcccattaccgcaaagtacatgaaggagactctgagccaaggtacaaatgtcatgtgtgtgacaaatgcttcacacggggcaacaacctcaccgtgcaccttcgcaagaagcaccagttcaagtggccctcagggcatccccgttttcggtacaaggaacatgaagatggctatatgcggctgcagctggttcgctacgagagtgtagagctgacacagcaactgctgcggcaaccacaagagggatcgggcctgggaacgtcgctgaacgagagcagcctgcagggcattattctagaaacagtgccaggggagccaggacgtaaggaagaggaagaggagggcaagggtagcgaagggacagccctctcagcctctcaggacaaccccagttctgtcatccacgtggtgaatcagaccaatgcccaaggccagcaagagattgtctactatgtgctgtctgaagccccaggggagcctcccccagcccctgagccaccttcagggggcatcatggaaaagcttcaaggaatagctgaggagccagagatccagatggtttgaaggccgcagagccagaccatttcttccccaggtcctgaagtttgagccaggcaagtggcagtgcccctagtgggcagccgttgccaatggatgcctttaggagtggtgccgagagcagtgtggtccactctggcctgggtttgcatcattctgcagactctaaagacttcccttttctgccagactacattttgtggggagcctgaggactctggattctttgaggggatcctggatgtgtgtgttcttgttaaagaggctgttatcaggcttaaccataaccctcaagatctgcttgacagtgattaaatccttagctcacatccattcccatctttcgggctccttaggcccaaggatggcatgtgactggtccctgcaagggtcctttctttgtcaccagccaaggcattgataaccaagtagccattttcctcttaaggtttcctctacaaccccaaggactttcatgattatcctcagggacaggattggaggcattgagcgtgtttattaacaaattgtttttggtaataaaataaatgcttggactcttaaaaaaaaaaaaaaaaaaaa

SEQ ID NO: 385 - DNA, 771 bp, Homo sapiens
atgaagctgacgcggaagatggttctgacccgggccaaggcctcggagctgcacagcgtgcgcaagctcaactgctggggcagccgcctcacagatatctccatttgccaggagatgcccagcctggaggtgatcacgctcagtgtcaacagcatctccaccctggagcctgtgagccggtgccagcgcctgagtgagctgtacctgcggaggaaccgcatccccagcctggctgagctcttctacctgaaggggctgccgcgtctgcgggtgctgtggctggccgagaacccgtgctgcggcaccagcccccaccgctaccgcatgaccgtgctgcgcaccctgccgcgcctacagaagctggacaaccaggctgtgacggaggaggagctgtcccgtgcactgagtgagggagaggagatcactgcggccccagagagagagggcacaggccacggcggccccaagctatgctgcacactgagctccctcagctccgctgctgagactggccgggacccgctggacagcgaggaggaggcaaccagcggcgcccaggatgaacgtggcctgaagccgccttcccggggccagtttccttccctctcagccagggatgcctcgagcagccacaggggcaggaacgtcctgactgccatcctgctgctgctgcgggagctggatgcagaggggctggaggccgtgcagcagactgtgggcagccggctgcaggccctgcgtggggaagaggtgcaggagcacgccgagtga

SEQ ID NO: 386 - DNA, 678 bp, Homo sapiens
atgtcgtgcgagtcgtctatggttctcgggtactgggatattcgtgggctggcgcacgccatccgcctgctcctggagttcacggatacctcttatgaggagaaacggtacacgtgcggggaagctcctgactatgatcgaagccaatggctggatgtgaaattcaagctagacctggactttcctaatctgccctacctcctggatgggaagaacaagatcacccagagcaatgccatcttgcgctacatcgctcgcaagcacaacatgtgtggtgagactgaagaagaaaagattcgagtggacatcatagagaaccaagtaatggatttccgcacacaactgataaggctctgttacagctctgaccacgaaaaactgaagcctcagtacttggaagagctacctggacaactgaaacaattctccatgtttctggggaaattctcatggtttgccggggaaaagctcacctttgtggattttctcacctatgatatcttggatcagaaccgtatatttgaccccaagtgcctggatgagttcccaaacctgaaggctttcatgtgccgttttgaggctttggagaaaatcgctgcctacttacagtctgatcagttctgcaagatgcccatcaacaacaagatggcccagtggggcaacaagcctgtatgctga

SEQ ID NO: 387 - DNA, 1929 bp, Homo sapiens
atgattcccaatggatatttgatgtttgaggatgaaaattttattgagtcttctgttgccaaattaaatgccctgaggaaaagtggccagttctgtgatgttcgacttcaggtctgtggccatgaaatgttagcacacagagcagtgctagcttgctgcagtccctatttatttgaaatctttaatagtgatagtgatcctcatggaatttctcacgttaaatttgatgatctcaatccagaagctgttgaagtcttgttgaattatgcctacactgctcagttgaaagcagataaggaattggtaaaagatgtttattctgcagcaaaaaagctgaagatggatcgagtaaagcaggtttgtggtgattatttactgtctagaatggatgttaccagctgcatctcttaccgaaattttgcaagttgtatgggagactcccgtttgttgaataaggttgatgcttatattcaggagcatttgttacaaatttctgaagaggaggagtttcttaagcttccaaggctaaagttggaggtaatgcttgaagataatgtttgcttgcccagcaatggcaaattatatacaaaggtaatcaactgggtgcagcgtagcatctgggagaatggagacagtctggaagagctgatggaagaggttcaaaccttgtactactcagctgatcacaagctgcttgatgggaacctactagatggacaggctgaggtgtttggcagtgatgatgaccacattcagtttgtgcagaaaaagccaccacgtgagaatggccataagcagataagtagcagttcaactggatgtctctcttctccaaatgctacagtacaaagccctaagcatgagtggaaaatcgttgcttcagaaaagacttcaaataacacttacttgtgcctggctgtgctggatggtatattctgtgtcatttttcttcatgggagaaacagcccacagagctcaccaacaagtactccaaaactaagtaagagtttaagctttgagatgcaacaagatgagctaatcgaaaagcccatgtctcctatgcagtacgcacgatctggtctgggaacagcagagatgaatggcaaactcatagctgcaggtggctataacagagaggaatgtcttcgaacagtcgaatgctataatccacatacagatcactggtcctttcttgctcccatgagaacaccaagagcccgatttcaaatggctgtactcatgggccagctctatgtggtaggtggatcaaatggccactcagatgacctgagttgtggagagatgtatgattcaaacatagatgactggattcctgttccagaattgagaactaaccgttgtaatgcaggagtgtgtgctctgaatggaaagttatacatcgttggtggctctgatccatatggtcaaaaaggactgaaaaattgtgatgtatttgatcctgtaacaaagttgtggacaagctgtgcccctcttaacattcggagacaccagtctgcagtctgtgagcttggtggttatttgtacataatcggaggtgcagaatcttggaattgtctgaacacagtagaacgatacaatcctgaaaataatacctggactttaattgcacccatgaatgtggctaggcgaggagctggagtggctgttcttaatggaaaactgtttgtatgtggtggctttgatggttctcatgccatcagttgtgtggaaatgtatgatccaactagaaatgaatggaagatgatgggaaatatgacttcaccaaggagcaatgctgggattgcaactgtagggaacaccatttatgcagtgggaggattcgatggcaatgaatttctgaatacggtggaagtctataaccttgagtcaaatgaatggagcccctatacaaagattttccagttttaa

SEQ ID NO: 388 - DNA, 548 bp, Homo sapiens
  misc_feature (472)..(472): n is a, c, g, or t
gcacgaggagagctagacgttacggagagtgtagtcactctcttttcccagctcagaggcctgcgccttcgtccgagagcccggccgatcgcattagatgtgttctgattgcacaaggccaggagagaccacactgaaaacgatcgtctcctttccttgcagggcaacgcgccccacgcgtgtgacgtgcgagagacgcgatggacgcgccttgctcttactgtgcaggtcctgagagcgtgtgggccacaggcgcccagtcgtgttgaggacatagaatcagccgctggaggggctgccgactgcgcgggcccttcccgctctcggtctcaccctaagggctaaggcgaccgagaaagccccattctccagtaggtaatggggcggcgcccggtgggctgcaggtggggagggctcccagcgccgccagcggccacccggggcgccggctcctggagggagagtggcctanaaatatccaaggaatccgaagcttcccctcctccacctctgccagtacggaaacaccccaccgtcacaatcctaaa

SEQ ID NO: 389 - DNA, 1041 bp, Homo sapiens
atggtggagaaggaggaggctggcggcggcattagcgaggaggaggcggcacagtatgaccggcagatccgcctgtggggactggaggcccagaaacggctgcgggcctctcgggtgcttcttgtcggcttgaaaggacttggggctgaaattgccaagaatctcatcttggcaggagtgaaaggactgaccatgctggatcacgaacaggtaactccagaagatcccggagctcagttcttgattcgtactgggtctgttggccgaaatagggctgaagcctctttggagcgagctcagaatctcaaccccatggtggatgtgaaggtggacactgaggatatagagaagaaaccagagtcatttttcactcaattcgatgctgtgtgtctgacttgctgctccagggatgtcatagttaaagttgaccagatctgtcacaaaaatagcatcaagttctttacaggagatgtttttggctaccatggatacacatttgccaatctaggagagcatgagtttgtagaggagaaaactaaagttgccaaagttagccaaggagtagaagatgggcccgacaccaagagagcaaaacttgattcttctgagacaacgatggtcaaaaagaaggtggtcttctgccctgttaaagaagccctggaggtggactggagcagtgagaaagcaaaggctgctctgaagcgcacgacctccgactactttctccttcaagtgctcttaaagttccgtacagataaaggaagagatcccagttctgatacatatgaggaagattctgagttgttgctccagatacgaaatgatgtgcttgactcactgggtattagtcctgacctgcttcctgaggactttgtcaggtactgcttctccgagatggccccagtgtgtgcggtggttggagggattttggcacaggaaattgtgaaggccctgtctcagcgggaccctcctcacaacaacttcttcttcttcgatggcatgaaggggaatgggattgtggagtgccttggccccaagtga

SEQ ID NO: 390 - DNA, 525 bp, Homo sapiens
atggctgctgccatggtgccggggcgcagcgagagctgggagcgcggggagcctggccgcccggccctgtacttctgcgggagcattcgcggcggacgcgaggacaggacgctgtacgagcggatcgtgtctcggctgcggcgattcgggacagtgctcaccgagcacgtggcggccgccgagctgggcgcgcgcggggaagaggctgctgggggtgacaggctcatccatgagcaggacctggagtggctgcagcaggcggacgtggtcgtggcagaagtgacacagccatccttgggtgtaggctatgagctgggccgggccgtggcctttaacaagcggatcctgtgcctgttccgcccgcagtctggccgcgtgctttcggccatgatccggggagcagcagatggctctcggttccaggtgtgggactatgaggagggagaggtggaggccctgctggatcgatacttcgaggctgatcctccagggcaggtggctgcctcccctgacccaaccacttga

SEQ ID NO: 391 - DNA, 1506 bp, Homo sapiens
atgccgtttgggtgtgtgactctgggcgacaagaagaactataaccagccatcggaggtgactgacagatatgatttgggacaggtcatcaagactgaggagttttgtgaaatcttccgggccaaggacaagacgacaggcaagctgcacacctgcaagaagttccagaagcgggacggccgcaaggtgcggaaagctgccaagaacgagataggcatcctcaagatggtgaagcatcccaacatcctacagctggtggatgtgtttgtgacccgcaaggagtactttatcttcctggagctggccacggggagggaggtgtttgactggatcctggaccagggctactactcggagcgagacacaagcaacgtggtacggcaagtcctggaggccgtggcctatttgcactcactcaagatcgtgcacaggaatctcaagctggagaacctggtttactacaaccggctgaagaactcgaagattgtcatcagtgacttccatctggctaagctagaaaatggcctcatcaaggagccctgtgggacccccgagtatctggccccagaggtggtaggccggcagcggtatggacgccctgtggactgctgggccattggagtcatcatgtacatcctgctttcaggcaatccacctttctatgaggaggtggaagaagatgattatgagaaccatgataagaatctcttccgcaagatcctggctggtgactatgagtttgactctccatattgggatgatatttcgcaggcagccaaagacctggtcacaaggctgatggaggtggagcaagaccagcggatcactgcagaagaggccatctcccatgagtggatttctggcaatgctgcttctgataagaacatcaaggatggtgtctgtgcccagattgaaaagaactttgccagggccaagtggaagaaggctgtccgagtgaccaccctcatgaaacggctccgggcaccagagcagtccagcacggctgcagcccagtcggcctcagccacagacactgccacccccggggctgcaggtggggccacagctgcagctgcgagtggagctacctcagcccctgagggtgatgctgctcgtgctgcaaagagtgataatgtggcccccgcagaccgtagtgccaccccagccacagatggaagtgccaccccagccactgatggcagtgtcaccccagccaccgatggaagcatcactccagccactgatgggagtgtcaccccagccactgacaggagcgctactccagccactgatgggagagccacaccagccacagaagagagcactgtgcccaccacccaaagcagtgccatgctggccaccaaggcagctgccacccctgagccggctatggcccagccggacagcacagccccagagggcgccacaggccaggctccaccctctagtaaaggggaagaggctgctggttatgcccaggagtctcaaagggaggaggccagctga

SEQ ID NO: 392 - DNA, 4895 bp, Homo sapiens
gccagaggagcggctccggccgccgcgcctgacccttgtccggggtcttccgcacaggatagaccatgaagctgaaggaacttgagcggccagctgtccaggcatggagcccagccagccaataccctttgtatctggccacaggaacatctgcccaacagctagattcctccttcagcacaaatggcacattggaaatatttgaggttgatttcagggacccttctctggacttgaaacacagaggagtcctttctgccttgagcaggtttcacaagctggtctgggggagctttggcagtgggcttctggaaagctccggggttattgttggcggcggggacaatggcatgcttattctatacaatgtgacccacatcctgtcttcggggaaggagcctgtgattgctcagaaacagaagcacacgggggctgtcagagccctcgacttgaatcctttccagggcaacctcctggcttcaggggccagcgattctgaaatcttcatttgggatctgaataacttgaatgtgccaatgaccctgggatccaagtcacagcagcctccagaggacatcaaggcactgtcttggaaccggcaagcccaacacattctgtcttctgctcaccccagtggcaaggcagttgtgtgggatctcaggaagaatgaacctatcatcaaagtcagtgatcacagcaacaggatgcactgctcaggcctggcctggcatcctgacatagccacccagttagtgctgtgctcagaggatgatcgacttcccgtgattcagctgtgggacttgcgctttgcctcctcgcccttgaaggtgctggagagccacagcagggggatcttgtcagtgtcatggagccaggctgatgctgagctgctgctcactagtgctaaggacagccagatcttgtgccggaacctggggagcagtgaggtggtatataagctaccaacacagagcagctggtgctttgatgtgcagtggtgccctcgggacccttcagtgttctctgctgcctccttcaacggctggatcagtttgtactctgtgatgggtaggagctgggaagtccagcatatgagacaggctgacaaggtttgaagggcttggtagagaatgctggagggaaggggctgtctctgtttgtgggagagagacatatggcttgagaagcggagatattggagattgggagaccagggcccggggtttgggagggctgcacctttgccctagtgcccatcttcctgaaaggatgttagtttctgccacaatgtgaagaaggccttcaccttgactcttgttattggatgggccctgtagtatttcagggaccgtgggacccctttgctgggacagttatttcaagagtatgactcttatctttctctcttctatagatccattttgtgccacactccattgtagactttgaatgtagtagtctttccaagagcctacttgcatgggagtcccaccctcgctaccactcacttccccatcccctggaatatgggagtctgacctttctaggtcaaattgggtgtctcaaggattcctcccaaaatggagtttgtaggtggagttcctgactaaactgccactttaggatggcgatgcaggtgtcttttccccccagatctcctcttccttcagcaaaggccagcctctcccaccactgcaggtgccagagcaagtggcacaagcaccactgatacctcccctgaaaaaaccccccaaatggattagaagaccaacaggtgtttcatttgcttttggagggaagctggttacttttggcctccccagcacccctgcccatctggtgccacagccttgcccccgcctagtcttcatcagtcaagtcaccacagaatctgaattcctgatgcgatcagctgagctgcaggaggccttgggatcaggaaatctactgaattactgtcagaacaagagccagcaagctttactgcaaagtgaaaagatgctgtggcagttcctgaagcccgccagagacagctcaggtgcaaggagatgagactatacatcaggcaggtgaccttagagcaagactccagaatgaaattcctaaagcttttaggatacagtaaagatgagcttcagaagaaggtggccacatggttgaagagtgacgtggggctaggtgagagtcctcagcccaagggaaatgacctcaacagtgacagacaacaggccttctgcagccaggcctccaaacacaccacaaaggaagcctctgcttcctcagccttctttgatgagctggtccctcagaacatgactccttgggagatccccatcacaaaagatattgatggactcctaagccaggctctcctgcttggggaactgggtccggccgtggagctgtgtctgaaggaggagcgctttgctgatgccattatcctggcccaggctgggggtacagatctgctgaagcaaacacaggagcgctacttggccaagaagaaaaccaaaatctcctcgcttctagcctgtgttgtgcaaaagaattggaaggatgtggtgtgtacctgtagcctgaagaactggagagaggcactggctttgctactgacatactcaggcacagagaaatttcccgagctctgtgacatgctgggaactcgcatggaacaggagggcagcagggcactaacctccgaagccagactctgttatgtgtgctcagggagtgtggagcggctggtggagtgctgggcaaaatgccaccaggctttgtcccccatggctctgcaggacctgatggagaaggtgatggttcttaacaggagcttggagcaactgcggggtcctcatggggtgagcccaggccctgccacaacctacagggtcactcagtatgccaacctcctggcagcccagggcagcctggccactgccatgagctttctacccagggactgtgctcagccaccagttcagcagctaagagatcggctttttcatgctcaaggttctgctgtcttgggccaacagtctccccctttccccttcccccggattgttgtgggagctaccctccactctaaagagacatcatcttacagattgggatcccagccttctcaccaggtcccaactccatctccaaggccaagggttttcacccctcagtcatcaccagcgatgcccttggcaccttcccatcctagcccttatcagggtcccaggacacagaatataagtgactacagggcacctgggccccaggccatccagcctttgcctttgagccctggggtaaggcctggacctcaagattcctggaaagaagccccagcccccaggggaaacctccagaggaacaagctgccagagacatttatgcccccagcaccaattactgctccagttatgagcctcacccctgagctacaagggattcttccctcacagccccctgtctccagtgtgagtcatgctcccccaggagttccaggagaactcagcctgcagcttcagcacctgccacctgagaagatggaaaggaaggagctgcccccagagcatcagtccttgaagagcagctttgaggcgcttctccaacgctgctccctgtctgcaactgacttaaagacaaaaaggaagctggaagaggcagcccagcgtctggagtatctatatgagaagctctgtgaggggacactctcacctcatgtcgtggctgggctccatgaggttgcccgatgtgtggatgcaggaagctttgagcagggccttgcagtgcatgcccaggtggcgggctgtagcagcttcagcgaggtgtccagcttcatgcctatcctgaaggctgtcctcatcatcgctcataagctgctggtctaaaccaggcagcctctcttgctaggaggccacttctgctgttacataactcctccctgcagaagaggggacttctgcaacagattctgtttctttttcccgactcttttccttgctgccaggtatgtgatgctgtaggcttggctccaaaccagctgagtgcctgctttttactcctttatgtctggccttctaggatctgtccaagacactctcaggcctggaggcagggcatagaatcagttcttcactctccctaatactacactctgtaaggacctggggcaggatatcttctcccccagggatcttctatttaagtggcttctgagagggtgaacaggattgttacttttaagcctacctctgctgtgacccatcatgtgggtcttttgtttctcccttctgtggtttatgagcctgcccttaccttttccctgcctctgacttggtatttccaggtccgtatttctctgtagcccagggtctggggtagagctgactgctgttcaccctttgaacaactcatggacgtgagggatgggtgctgagcagaaccaagagaggaaactttggcgctgttaaaatggaatttctcatctgccggcattattaagggtgggctaggttggatggaaggtgaaagggatgaactgccttttgctggaagctgtcttaggctgtgagacaggagcaggggaaccacagcctatggggaactgcccttgactccacctatgttggagccttagcccaaggccattccttctgtgatgataaagcccagttctggaattggagccatattaaggaatgattctcttccagcgctgctcctcaagggttgggggtccttctccctcgcagccaccacatgtctcagggctaccttctccgattggatttgcatttgtggcactgtctttgatgcagtgatgtacttaatggtgcaataaagctgcttcgatttggtaaaaaaaaaaaaaaaaaaaaaaaaaaaaaaaaaaaaaaaaa

SEQ ID NO: 393 - DNA, 786 bp, Homo sapiens
atgacgtgctggctgcggggcgtcacggcgacgttcgggcgacctgccgagtggccaggctacctcagtcacctgtgtggtcgcagtgctgccatggacctgggacccatgcgcaagagttaccgcggggaccgagaggcatttgaggagactcatctgacctcccttgacccagtgaaacagtttgctgcctggtttgaggaggctgttcagtgtcctgacataggggaagccaatgccatgtgtctggctacctgcaccagagatggaaaaccctctgctcgcatgttgctgctgaagggcttcgggaaagatggcttccgcttcttcactaacttcgagagtcgaaaaggaaaagagctggactctaatccctttgcttcccttgtcttctactgggagccacttaaccgtcaggtgcgtgtggaaggccctgtgaagaaactgcctgaggaggaggctgagtgctacttccactcccgccccaagagcagccagattggggctgtggtcagccaccagagttctgtgatccctgatcgggagtatctgagaaagaaaaatgaggaactggaacagctctaccaggatcaagaggtgcccaagccaaaatcctggggtggctatgtcctgtaccctcaggtgatggagttctggcaaggtcaaaccaaccgcctgcatgaccggatagtctttcggcggggcctacccacaggagattcccctttggggcccatgacccaccgcggggaggaagactggctctatgagagacttgcaccttaa

SEQ ID NO: 394 - DNA, 1597 bp, Homo sapiens
cgcccactggggatggcaaagacgacatccggtgcgccgaggctgctcacaaaatcactcacctgtggcgcccttggccgctcagtcaaggctctgaatatcctgagactgccccactgcttggaagccctggacaccagagagtttcctgtaggtcctccagccgagcccgatgaccccggcaggcccgggagtgatgtccccctctggatgatcccaaccccttgctgtggattcagccccagccgttgttgtgtcttttggggaccttgtcagttgccttccaagtgctaattctcatgacgagataagaatggctatgactgggtgttgattgatgagtcgaacacattgaatcctggagtttgaggttatcagaactccccacttagaaaatcatcctttatattttagaaaatcatcattgtatgttgaacatacaatgcttcttttttcttcatctccagtgcactggtctagagagcggcagttggaccccagagtgtggcacgtgttcctgtgttcatttgaacattctctgatgacctgtcgctgaggtcctgtgatgatgcgtatcctgtcttccaccccaactgccactgtgtttcaactgtcgctggctgtgtttcaactgctgctgtgttggaactgccagctagactgctcaccaaaatgggaggcagcctctgctgctgtggtgaaggtgaaggcttcttctaccgccagaattggcggtttctctcgctggattcttgggacctgatccaggcagcacactcgacacactcagcgattcagctctacagtatgcactctgggatctcccatttgctaaggaaggatcttagctttgagaaaggtgacactttcctccctacttttgctggagaactaccctggtttgagcttcctgctggaaatgagtggcaagagatcccctcttgaggagactccgcaggaacaccagagatgatagtgacacacaacaactgaaggcagaggtacaggctgaggagaaaggtgtcaagcctgtggcagcagagcttcctggggagtcctcagagcaagtcattgccattgtcgaagtgtcttctaggctttattttggggccattacctcgagcactgtttcttgtctggtttcctaatgtcagcaactgaagaaaagacctgtatacacaggacacagcatggtctgacgctcacagtgttttcctttctctctgcagagggattcagcactttgggcaagtggttgcacagaggatcccgtggaagaattcatatatgaatcagatgagaatgccccaggaccatcgtagataccaacaagccctctcccggcacctgcagaaaaagtggggaaaatccccgaagaggcagaaacattcatccggaagggccgccagccagtggatttcccgggcccctcagccctctggagtgtacgagttttggagaaacctcttcctctgtatatgcttttgactttcctggactgatgtaaaaatactcttttctttgacctgtttatttttaagacacgacgtgattgtgtcagcttatattttattgctgaagtaaattttcaaatgtt

SEQ ID NO: 395 - DNA, 1032 bp, Homo sapiens
atggagagtaaatacaaggagatactcttgctaacaggcctggataacatcactgatgaggaactggataggtttaagttctttctttcagacgagtttaatattgccacaggcaaactacatactgcaaacagaatacaagtagctaccttgatgattcaaaatgctggggcggtgtctgcagtgatgaagaccattcgtatttttcagaagttgaattatatgcttttggcaaaacgtcttcaggaggagaaggagaaagttgataagcaatacaaatcggtaacaaaaccaaagccactaagtcaagctgaaatgagtcctgctgcatctgcagccatcagaaatgatgtcgcaaagcaacgtgctgcaccaaaagtctctcctcatgttaagcctgaacagaaacagatggtggcccagcaggaatctatcagagaagggtttcagaagcgctgtttgccagttatggtactgaaagcaaagaagcccttcacgtttgagacccaagaaggcaagcaggagatgtttcatgctacagtggctacagaaaaggaattcttctttgtaaaagtttttaatacactgctgaaagataaattcattccaaagagaataattataatagcaagatattatcggcacagtggtttcttagaggtaaatagcgcctcacgtgtgttagatgctgaatctgaccaaaaggttaatgtcccgctgaacattatcagaaaagctggtgaaaccccgaagatcaacacgcttcaaactcagccccttggaacaattgtgaatggtttgtttgtagtccagaaggtaacagaaaagaagaaaaacatattatttgacctaagtgacaacactgggaaaatggaagtactgggggttagaaacgaggacacaatgaaatgtaaggaaggagataaggttcgacttacattcttcacactgtcaaaaaatggagaaaaactacagctgacatctggagttcatagcaccataaaggttattaaggccaaaaaaaaaacatag

SEQ ID NO: 396 - DNA, 1257 bp, Homo sapiens
gtcccgacgcctcccgcccccgcagttccttggagagcttggagccgcgcgccggagggaataggaaagcttggttacaacccgggacacccggagcttcaggatggttcgtactaagacatggaccctgaagaagcactttgttggctatcctactaatagtgactttgagttgaagacatctgagctcccacccttaaaaaatggagaggtcctgcttgaagctttgttcctcaccgtggatccctacatgagagtggcagccaaaagattgaaggaaggtgatacaatgatggggcagcaagtggccaaagttgtggaaagtaaaaatgtagccctaccaaaaggaactattgtactggcttctccaggctggacaacgcactccatttctgatgggaaagatctggaaaagctgctgacagagtggccagacacaataccactgtctttggctctggggacagttggcatgccaggcctgactgcctactttggcctacttgaaatctgtggtgtgaagggtggagaaacagtgatggttaatgcagcagctggagctgtgggctcagtcgtggggcagattgcaaagctcaagggctgcaaagttgttggagcagtagggtctgatgaaaaggttgcctaccttcaaaagcttggatttgatgtcgtctttaactacaagacggtagagtctttggaagaaaccttgaagaaagcgtctcctgatggttatgattgttattttgataatgtaggtggagagttttcaaacactgttatcggccagatgaagaaatttggaaggattgccatatgtggagccatctctacatataacagaaccggcccacttcccccaggcccacccccagagattgttatctatcaggagcttcgcatggaagcttttgtcgtctaccgctggcaaggagatgcccgccaaaaagctctgaaggacttgctgaaatgggtcttagagggtaaaatccagtacaaggaatatatcattgaaggatttgaaaacatgccagccgcatttatgggaatgctgaaaggagataatttggggaagacaatagtgaaagcatgaaaaagaggacacatggaatctggaggccatttagatgattagttaatttgtttttcaccatttagcaaaaatgtatactaccttaaatgtcttaagaaatagtactcataatgagtttgagctacttaataaaatacatttaagtggtaaaaaaaaaaaaaaaa

SEQ ID NO: 397 - DNA, 860 bp, Homo sapiens
ccggattttcagaagcgactcccccggggcgggggtgcgcgtgtggtctctagaaactgagggaaagtagacagaccgtgctcaccgatttaaaagaacagccctgaaatgacccccgttacaccctgttctctttagacaagttacttccacctggagcggtttctgggcccgggtatggggatttcttcacccggccccctaggctttcacctcggtggaatttcccgcgcccccgctgggatgatttagggactgttggctagaactgcccttgcctaccgccctactgcgggcgctcccctgtctggggggtgcttggctgggtgtggagaaggatcaatcacagctgactcctcagaggtgacagcccctgcccccttaaaaacaagaaaagacctagcagtgtgaagccaaactgcacccccagccccggtgacatgaggaaaccgtgaggcgctcagcctgaggttcatcgttcatctccttcctgcttggaatcagaatgtcctcactgctgagtttctccgttttatgggattacattagtggacaaagggagtgaagcaaagcagcactgagctcctccaagtaaggaaagaattgttttctgtacaacctggagctgaatcatagaaggagaagacagcttgaaaaataaaagggccgtaagggcgaacccacagaggatggggaggattttccccagcacccccagccccccatagtcagctctgggttcagcgattttccgccaactcctttcatggaccccatgccggaattttggtttttatgccagacccctgcagaaaaaaaggaactctggcaaggttaagggaccttgcctttcttacaac

SEQ ID NO: 398 - DNA, 659 bp, Homo sapiens
ttttttttttttttttctgctttcatactatattcattggaaaggagctactatgagtaacccacacataagaagtgaggatttatgttctacctctccagagtgtttttaaaagtagaagagggctgaattacatcttgaaagaagagaaatggctcaataaaataaacaaaatgcactctgccctttgggagattatgaactacttttggtaactcttaaaataataaatagtctctttaaaaaagtaagtggagcttcattgtctaaaccattctcaactgagaagtactctatggttatcctttttatgggaaacaagcaggtcagccattgtgcttctttcacatcttgaaaatgtcttattcttgaggtaagttaatatttatttgctaaaatatttgaatctggtatttaccaactcgattgatttgcttcaaatctttgtattaactttctcacatccattaacaaaatgcaggaaaccaatgcactttccttgagaatttactgttgctataacccctgagttaatgaccttaaatacaaagaagaaattcaactcccccgcccatcatgcactttgcaagacctttatgattacaaagaatcttaacataaataatgcaagatcgataacacagtaagccaaattgcat

SEQ ID NO: 399 - DNA, 597 bp, Homo sapiens
atgagcacggtggaccttgctcgcgtgggcgcgtgcatcctgaagcatgcggtgaccggggaggccgtggagctgcggagcctgtggcgggagcacgcgtgcgtggtggccgggctgcggcgcttcgggtgcgtggtgtgccgctggatcgcccaggacctcagcagccttgctgggctcctggaccaacacggcgtgcgcctggtgggcgtagggcccgaggccctgggtctgcaggagttcctggacggcgactacttcgcgggagagctctacctggatgagagcaagcagctttacaaggagctaggcttcaagcggtacaacagcctgagcatcctcccagcagctctggggaagcccgtgcgtgatgtggctgccaaggccaaggctgttggcatccaggggaacttgtctggggacctgctgcagagcggagggctgctggtggtcagcaaaggtggtgataaagtgctcctgcatttcgtccagaagtccccaggcgactacgtccccaaggagcacatcctgcaggtcctgggcatctctgcggaggtctgtgccagcgacccgcctcagtgtgacagagaggtgtga

SEQ ID NO: 400 - DNA, 5159 bp, Homo sapiens
cgcatggagcggcgcgggccgggggccgccacggcgaggggccgggccaggccgggcggagccagagcagctgagttccagataaaaactgtcagacccggcctgtaggctgctccattgccaatgaactccatgaaccccatgaaacctgccctgccccctgcgccacacggtgatggttcattcgcatatgagtctgtgccttggcaacaaagcgccactcagccggctggatcgctgtctgtggtcactactgtgtggggagttggcaacgcgacacagagccaggttttggggaaccccatgggccctgcagggagtccctctggcagctccatgatgcctggtgtggcagggggcagctccgccttgacctccccacagtgcctgggacagcaggcgtttgctgaaggcggcgccaacaagggctacgtgcagcaaggcgtgtacagccgcgggggctaccctggggcccccggcttcaccaccgggtatgcaggcggcccggggggcctgggcctcccctcacatgctgcaagaccctccactgacttcacgcaagcggcagctgctgcagctgtggctgctgcggcagccactgccaccgccacagccacagccaccgtggctgctctccaggagaagcagagccaggagctgagccagtatggagcgatgggggccggacagtcttttaacagccagtttctgcagcatggaggtccccgggggcctagtgtccccgctggcatgaaccctactggcataggaggggtaatgggcccctctggcctctcccccttggctatgaaccccacccgggcagcaggaatgacacccttgtatgcagggcagcgtctgccccaacatgggtatcctgggcctccccaggcccagccactgccccgacagggggtcaagagaacctactctgaggtgtatccagggcagcagtatctgcaaggaggccagtatgcacccagcaccgcccagtttgcgcccagccctgggcagccccctgccccctccccttcctaccctgggcacaggctgcccctgcagcagggcatgacccagtccctgtccgtgcctggccccacgggactgcattataagcccacagagcagttcaacgggcagggcgccagcttcaacgggggcagcgtcagctacagccaacctggcctgagtgggcctacccgttccatcccgggctatcccagttccccactgccagggaaccccacgccacccatgaccccaagcagcagcgtcccttacatgtcaccaaaccaagaggtcaagtctcccttcttgcctgatctcaagcccaacctcaactccttgcactcatcgccctctggaagcgggccttgtgacgagttgcggctgaccttccctgtgcgcgatggggtggtcctggagcccttccgcctgcagcacaacctggctgtaagcaaccatgtcttccagctgcgagactcagtctacaagaccctgataatgaggcctgacctggagctgcaattcaagtgctaccaccacgaggaccggcagatgaacaccaactggccagcctcggtgcaggtcagcgtcaatgccacgccgctcaccatcgagcgtggcgacaacaagacctcgcacaagccactctacctgaagcatgtgtgccagccaggccgcaacaccatccagatcaccgtcaccgcctgctgctgctcccacctcttcgtgctgcagctagtgcaccgcccatccgtccgctcggtgctgcagggcctcctcaaaaagcgcctcctgcctgctgagcactgcatcaccaagataaagcggaacttcagcagcggcaccatccctggcacccctgggcccaacggagaggacggggtggagcagacagctatcaaggtgtccctgaagtgccccatcaccttccgcaggatccagctccctgcccgaggtcatgactgtcgccacatacagtgctttgacctggagtcgtacctgcagctcaactgtgagcgggggacttggaggtgtcctgtgtgcaacaagacagctttgctggagggcctggaggtggaccagtacatgctgggcatcctgatttacattcagaactctgactatgaggagatcaccatcgaccccacgtgcagctggaagccagtgcccgtgaagcctgacatgcacatcaaggaggagccggatgggccagcactgaagcgctgccgcaccgtgagccccgcccacgtgctcatgcccagcgtgatggagatgatcgccgccctgggccccggcgctgccccctttgcccccctgcagcccccctcagtccctgcccccagcgactaccctggccagggttccagcttcctggggcctggaactttccctgagtccttcccacccaccacgcccagcaccccaacccttgctgagttcaccccgggaccaccccccatctcctaccagtctgacattcccagcagcctcctgacttcagagaagtctaccgcctgcctcccaagccagatggcaccagcaggtcacctggaccccactcacaatcctgggacaccaggactacacacctccaaccttggggcccctccaggtccccagctgcaccattcaaaccctcccccagcgtcccggcagtccttgggccaagcgagcttaggacctacgggtgaactggccttcagtcctgccacaggcgtgatggggccccccagcatgtctggagccggggaggccccagaaccagctctggacctgctcccggaactgaccaaccctgatgagctactgtcctacttgggcccacccgacctccctacgaacaacaatgacgacctgctttctctgtttgagaacaactgatcctgtgtttaccccaagcccggcggggacacgctcacagatgtcaccacagccctgcccttcatgcccagccccatgggacacccggtggtctttcccaaacctcccccaaaacacacctggagccagagccttctgccgccagccctgcccctgaattggaagcagccctgtgctcgatgggaggggctcccaggccggcagcccttgccacctccctctgccaagcctgctgctgcagaacggtttttgctgaggtgcccctgcccagccctgtccagccttgtccacacacacatctcacgcccctggtctcacagcctcacaccttgtccttccacccctgcctgcccccacccagcctgcttcttgtccagcattgatccttctgtttcaacaactcctccactgggcagagctgggcatctggcagggctggctctgtcccctgggcctttggctccagtggcccctgtgcccagcagtccagctcttggaacctcgctgaatggcagcctcttgggggcctggagctctggcagcccagccgtgtgtggtgtcaggttcctctccccaccccagcttcaagcagaggcctcggggtgggggagctacaaagcacaacaatgtacatagtgtagaaacactaacagctgggagaggggagccagctgtccagccagcatgttcctgttgtacagcccggtctccctgcgcgctctgctccttcccatgtgcagacagatcagggaggaacctccaatgggtgggggacagtgagcttcggcctggccgaggtgggtgggtgggctctcagattcagctctgtgtaaagattctctagcgggctgcgctcccaagttccccttctctgtgaaagtgaagaattagtacagctgtgttttttaaagccacctctctgtctccaccccatgggcccacacccaggtgggggaggaggaagccactgcatctgttggctcagggccccagcctgtgcgagcagggcgcctgggctgttgtgtctcctgtctgtgccgatctctattaaaggactccctcttggtgggcctggccgagtccctcctttgtgctcccagggactattttctcctcgtaagccagcgacctgcctaaagcttgggctgtgcctgcaaagcttgtgcaggacctgggggccaggtcgaccttcaagtggcttttggggccccaggttgagctctggatgtttcaagccaaggctcggctattcccgccccatagtaaatttccttttccctggaattttccaagttggcttcagctgaagagctgttttgtgaagcatcccaggcttgcccaggagagacatttgccactatgtcaccttatctgggcttgccctggggcactgagacagttgtttggcagccccagcccagccaggggctcatccttctcagctcttgtccctgggaggcctctgcttgtcacttcccagagattgcagaggtgtgtcctgcctaccatctgcctgtccagcttggtgggggtccgggtcaccatttcctccagtcctgggccccatccttgagggccttcccagccagccagcaggagaggcaagaactgggggaacacaggaacctaggggaggaggggagcgctgggcatcctcaggctggcggccaaggcctgcccctggaggcactagaggagggcatctgtctgtgggagcccagaggctgcagggaggaggaggagggaggtatctggtgtgagcgttgcccctgcgacatttgggaccacacaggtgggcttccttattccctgacaaagcctctgtttccagctcttccgccctctctggatgagggaacagaagtggaggaaacaaaagaagcagcagcacgcacagtcctgtcgctgggtgcggagacagcctggcaaagtcccactcagccatggcctgatgcaggccccaggccctcctttcttgggtgtcaaatgactgtgtcctggacatctgatgcaccacctgccctgcctgttgcaaacgtgatgctcccggatggagtggagaaactaggagactgggacaagcaaaaggctgcaaacaacccagaagcccatcctcagaagactggagaaatgattgaggaatgcatgggcaccgtggccctgtgctccatcacaaacacctctcagaaacaacgtgggatgaaaaagcaagacagttcatacagtatgatgccatttttataaagctcaaaaccaaaaaaaaaaaaaaaaaa

SEQ ID NO: 401 - DNA, 732 bp, Homo sapiens
gcacccccagtttttccatcctcctcattcgtctaggggcacccgaatcccctattccttatttcccctatcactcaggcactggcagggtccttttcccactcctgttggccgccgcggctccaaagcgagctgggcagatgtgcctgagacaggtttgaccaggcaactgaaaatatatccctaagagaagacaaaacaaagatatgaaaggaacacacttccctgactgactaggaggaacagagctgcctgctgactggaaccgcttcctcccagactaaggtttcccagaggaagagagagaatttggacaaatgaatgaggaacaacgctctcctgagggttttctttaaggggcaaggatcaaagcctctagatcctttgaaagcagagttaagaggcagtgcaggaaggcacagcaggaaggttcatggttagactacagagaaggaagcagccactgctggggacctaccctgtgctggtcactgacaagctgtctcattaaaccttcccggaccctcaacccctcctagtatcttatcctcattttacagatgagaagactgcggcccaaagaggtccaatgccagtgggatcagcttcgatgggatgcgcacagactgacctcttctccccagccccttcaacttcccagagctgcagggggcctgggagttcttggtaacagcacattaaacctctgtttgtgggaaaaaaaaaaaaaaa

SEQ ID NO: 402 - DNA, 1434 bp, Homo sapiens
atgccgggcagcgacacggcgctcaccgtggaccggacctactcgtaccccggccggcaccaccgctgcaagagccgggtagaacgtcatgacatgaataccttaagcctgcccctgaacatacgccgaggggggtcagacaccaacctcaactttgatgtcccggatggcatcctggacttccacaaggtcaaactcactgcagacagcctgaagcaaaaaattctaaaggtaacagagcagataaaaattgagcaaacatcgcgcgatgggaatgttgcggagtatctgaaactagtgaacaacgcagacaagcagcaggcgggacgtatcaagcaagtctttgagaagaagaatcagaaatcagctcactccatcgcccagctgcagaagaagttagagcagtatcatcgaaagctcagagagatcgagcagaatggagcctctaggagctcaaaggacatttccaaagaccacctgaaggatatacatcgctctttgaaagatgcccacgtgaaatctcgaactgccccccattgcatggagagcagcaaatcgggcatgccaggggtctcacttactccacctgtgttcgttttcaataagtccagagagtttgccaacctgatccggaataagtttggcagcgccgacaacattgctcacttgaaaaattccttagaggagtttaggccagaggcgagtgccagggcctacgggggcagcgctaccatcgtgaacaaacccaagtatggcagtgatgatgaatgttcgagtggcacgtcaggctcggccgacagtaacggaaaccagtcgtttggggctggtggagccagcacactggacagccagggcaagctcgccgtgatcctggaggaactgagggagatcaaggatacccaagctcagctggctgaggacatcgaggcactgaaggtgcagtttaagagagaatatggttttatttctcagaccctgcaagaggaaagatacaggtatgagcgactggaggaccagctgcatgacctgacggacctgcatcagcatgagacagccaacctgaagcaggagctggccagcattgaggagaaggtggcctaccaggcctacgagcgctcgcgggacatccaggaagccttggaatcctgccagactcgcatttctaagctggagctccaccagcaagagcagcaagctctgcagacagacaccgtgaatgctaaagttctcctggggaggtgcatcaacgtgatcctggccttcatgactgtcatcttagtgtgtgtgtccaccatcgcgaagttcgtctcacccatgatgaagagtcgctgccacattcttggcaccttctttgccgtgactcttcttgctatattttgtaaaaactgggaccatatcctgtgtgccatagaaaggatgataataccaagatga

SEQ ID NO: 403 - DNA, 1056 bp, Homo sapiens
atgggcgacccggaaaggccggaagcggccgggctggatcaggatgagagatcatcttcagacaccaacgaaagtgaaataaagtcaaatgaagagccactcctaagaaagagttctcgccggtttgtcatctttccaatccagtaccctgatatttggaaaatgtataaacaggcacaggcttccttctggacagcagaagaggtcgacttatcaaaggatctccctcactggaacaagcttaaagcagatgagaagtacttcatctctcacatcttagccttttttgcagccagtgatggaattgtaaatgaaaatttggtggagcgctttagtcaggaggtgcaggttccagaggctcgctgtttctatggctttcaaattctcatcgagaatgttcactcagagatgtacagtttgctgatagacacttacatcagagatcccaagaaaagggaatttttatttaatgcaattgaaaccatgccctatgttaagaaaaaagcagattgggccttgcgatggatagcagatagaaaatctacttttggggaaagagtggtggcctttgctgctgtagaaggagttttcttctcaggatcttttgctgctatattctggctaaagaagagaggtcttatgccaggactcactttttccaatgaactcatcagcagagatgaaggacttcactgtgactttgcttgcctgatgttccaatacttagtaaataagccttcagaagaaagggtcagggagatcattgttgatgctgtcaaaattgagcaggagtttttaacagaagccttgccagttggcctcattggaatgaattgcattttgatgaaacagtacattgagtttgtagctgacagattacttgtggaacttggattctcaaaggtttttcaggcagaaaatccttttgattttatggaaaacatttctttagaaggaaaaacaaatttctttgagaaacgagtttcagagtatcagcgttttgcagttatggcagaaaccacagataacgtcttcaccttggatgcagatttttaa

SEQ ID NO: 404 - DNA, 1815 bp, Homo sapiens
atggctaaagaatctggaataagcttgaaagaaatacaggtcctggcaaggcaatggaaagttggtcctgagaaaagggtgccagcgatgcctggatcgcctgtggaagtgaagatacagtccagatcctcacctcccaccatgccacccctcccaccaataaatcctggaggaccgaggccagtgtccttcactcctactgcattaagcaatggcatcaaccattctcctcctaccctgaatggtgccccatcaccgccacagagattcagcaatggtcctgcctcctccacatcatctgcactcacaaatcagcaattgccagccacttgtggtgctcgacaactcagcaagttgaaacgctttcttaccactctgcaacagtttggcaatgacatctcccctgagattggggagaaggtgcggactcttgttcttgcactggtgaactcaacagtgacaattgaggaattccactgtaagctccaagaagccacaaactttccccttcgtccttttgtgattccatttctcaaggccaacctgcccctgctgcagcgggaactgctgcactgcgctcgggcggccaagcagaccccatcccagtacctggctcagcacgaacaccttctgctcaacacaagcattgcatcgcctgctgactcgtcagagttgctcatggaggtgcacggaaatgggaagaggcccagtccagagaggagagaagagaatagttttgatagagacacaattgctcctgagcctcctgccaagagagtatgtaccatcagccctgctcctcggcacagtcctgctctcactgtgcccctcatgaatcccgggggccaattccatcctacccctccacctcttcagcattacaccttagaggatattgcaacttctcacctgtatcgggaacccaacaagatgctagagcatcgagaagttcgtgatagacaccacagtcttggtctaaatggaggctatcaagatgagttggtagatcatcgtttgacagaaagggaatgggctgatgaatggaaacatcttgaccatgcgctgaattgcattatggaaatggtagagaaaacaaggcgctctatggcagttctgcggcgctgtcaggaatcagatcgtgaagaactcaactactggaaaagacggtacaatgaaaacacagagctgaggaaaacggggaccgagttggtctccaggcagcacagccctgggagtgcagattctctcagcaatgattctcagagagagttcaacagcaggccaggtacaggatacgtacctgtggagttttggaaaaaaacagaagaagctgtgaataaggtgaaaattcaggccatgtcagaagtacagaaggccgtcgctgaggcagagcagaaagcctttgaagtgattgcaacagagagagcacgaatggagcaaaccatagcggatgtcaagcggcaggccgcagaggatgctttcctcgtcatcaatgagcaagaggagtccacggagaactgctggaactgtggccgcaaagccagcgagacatgcagtggctgcaatatcgcgcgatactgtggctctttctgccagcacaaggactgggagcggcaccaccgcctctgtggtcagaacctgcatggccagagcccccacggccagggccggccgctgcttcctgtaggcaggggctcctctgccaggtccgccgactgcagcgtgcccagcccagccctcgacaagacctcggcaaccacatcgcgttcctcaacacctgcttctgtgacagctatcgacaccaacggactctga

SEQ ID NO: 405 - DNA, 1233 bp, Homo sapiens
atgcttcaagaacaagtcagtgaatatttgggtgtgacctcctttaaaaggaaatatccagatttagagcgacgagatttgtctcacaaggagaaactctacctgagagagctaaatgtcattactgaaactcagtgcactctaggcttaacagcattgcgcagtgatgaagtgattgatttaatgataaaagaatatccagccaaacatgctgagtattctgttattctacaagaaaaagaacgtcaacgaattacagaccattataaagagtattcccaaatgcaacaacagaatactcagaaagttgaagccagtaaagtgcctgagtatattaagaaagctgccaaaaaagcagcagaatttaatagcaacttaaaccgggaacgcatggaagaaagaagagcttattttgacttgcagacacatgttatccaggtacctcaagggaagtacaaagttttgccaacagagcgaacaaaggtcagttcttacccagtggctctcatccccggacagttccaggaatattataagaggtactcaccagatgagctgcggtatctgccattaaacacagccctgtatgagccccctctggatcctgagctccctgctctagacagtgatggtgattcagatgatggcgaagatggtcgaggtgatgagaaacggaaaaataaaggcacttcggacagctcctctggcaatgtatctgaaggggaaagccctcctgacagccaggaggactctttccagggaagacagaaatcaaaagacaaagctgccactccaagaaaagatggtcccaaacgttctgtactgtccaagtcagttcctgggtacaagccaaaggtcattccaaatgctatatgtggaatttgtctgaagggtaaggagtccaacaagaaaggaaaggctgaatcacttatacactgctcccaatgtgagaatagtggccatccttcttgcctggatatgacaatggagcttgtttctatgattaagacctacccatggcagtgtatggaatgtaaaacatgcattatatgtggacaaccccaccatgaagaagaaatgatgttctgtgatatgtgtgacagaggttatcatactttttgtgtgggccttggtgctattccatcaggtcgctggatttgtgactgttgtcagcgggcccccccaacacccaggaaagtgggcagaagggggaaaaacagcaaagagggataa

SEQ ID NO: 406 - DNA, 373 bp, Homo sapiens
cccatggtagggactctgacatccagccatctcaatattccagagaagaggatgagtgtgaagggtggtggcgattttaaacaaggtgatcaggaagaccttgtggataacttcgggtctgagcacactccatcaggctgccggatagtctcaccattactcccgttatttggaacctcttcactgcaacgtgaccttgtttatacagtggaattttccagatgctacacaatatgtgacgttgcaacagattgaagaagcaaatatgagaatcatatcttctatggaatcagaaactcaatttgcaaaaatgaaaaacaatgtgactcttctcactattcttttcggatatacaattatgttcaattaaaat

SEQ ID NO: 407 - DNA, 2727 bp, Homo sapiens
atggaggagggaggccgggacaaggcgccggtgcagccccagcagtctccagcggcggcccccggcggcacggacgagaagccgagcggcaaggagcggcgggatgccggggacaaggacaaagaacaggagctgtctgaagaggataaacagcttcaagatgaactggagatgctcgtggaacgactaggggagaaggatacatccctgtatcgaccagcgctggaggaattgcgaaggcagattcgttcttctacaacttccatgacttcagtgcccaagcctctcaaatttctgcgtccacactatggcaaactgaaggaaatctatgagaacatggcccctggggagaataagcgttttgctgctgacatcatctccgttttggccatgaccatgagtggggagcgtgagtgcctcaagtatcggctagtgggctcccaggaggaattggcatcatggggtcatgagtatgtcaggcatctggcaggagaagtggctaaggagtggcaggagctggatgacgcagagaaggtccagcgggagcctctgctcactctggtgaaggaaatcgtcccctataacatggcccacaatgcagagcatgaggcttgcgacctgcttatggaaattgagcaggtggacatgctggagaaggacattgatgaaaatgcatatgcaaaggtctgcctttatctcaccagttgtgtgaattacgtgcctgagcctgagaactcagccctactgcgttgtgccctgggtgtgttccgaaagtttagccgcttccctgaagctctgagattggcattgatgctcaatgacatggagttggtagaagacatcttcacctcctgcaaggatgtggtagtacagaaacagatggcattcatgctaggccggcatggggtgttcctggagctgagtgaagatgtcgaggagtatgaggacctgacagagatcatgtccaatgtacagctcaacagcaacttcttggccttagctcgggagctggacatcatggagcccaaggtgcctgatgacatctacaaaacccacctagagaacaacaggtttgggggcagtggctctcaggtggactctgcccgcatgaacctggcctcctcttttgtgaatggctttgtgaatgcagcttttggccaagacaagctgctaacagatgatggcaacaaatggctttacaagaacaaggaccacggaatgttgagtgcagctgcatctcttgggatgattctgctgtgggatgtggatggtggcctcacccagattgacaagtacctgtactcctctgaggactacattaagtcaggagctcttcttgcctgtggcatagtgaactctggggtccggaatgagtgtgaccctgctctggcactgctctcagactatgttctccacaacagcaacaccatgagacttggttccatctttgggctaggcttggcttatgctggctcaaatcgtgaagatgtcctaacactgctgctgcctgtgatgggagattcaaagtccagcatggaggtggcaggtgtcacagctttagcctgtggaatgatagcagtagggtcctgcaatggagatgtaacttccactatccttcagaccatcatggagaagtcagagactgagctcaaggatacttatgctcgttggcttcctcttggactgggtctcaaccacctggggaagggtgaggccatcgaggcaatcctggctgcactggaggttgtgtcagagccattccgcagttttgccaacacactggtggatgtgtgtgcatatgcaggctctgggaatgtgctgaaggtgcagcagctgctccacatttgtagcgaacactttgactccaaagagaaggaggaagacaaagacaagaaggaaaagaaagacaaggacaagaaggaagcccctgctgacatgggagcacatcagggagtggctgttctggggattgcccttattgctatgggggaggagattggtgcagagatggcattacgaacctttggccacttgctgagatatggggagcctacactccggagggctgtacctttagcactggccctcatctctgtttcaaatccacgactcaacatcctggataccctaagcaaattctctcatgatgctgatccagaagtttcctataactccatttttgccatgggcatggtgggcagtggtaccaataatgcccgtctggctgcaatgctgcgccagttagctcaatatcatgccaaggacccaaacaacctcttcatggtgcgcttggcacagggcctgacacatttagggaagggcacccttaccctctgcccctaccacagcgaccggcagcttatgagccaggtggccgtggctggactgctcactgtgcttgtctctttcctggatgttcgaaacattattctaggcaaatcacactatgtattgtatgggctggtggctgccatgcagccccgaatgctggttacgtttgatgaggagctgcggccattgccagtgtctgtccgtgtgggccaggcagtggatgtggtgggccaggctggcaagccgaagactatcacagggttccagacgcatacaaccccagtgttgttggcccacggggaacgggcagaattggccactgaggagtttcttcctgttacccccattctggaaggttttgttatccttcggaagaaccccaattatgatctctaa

SEQ ID NO: 408 - DNA, 381 bp, Homo sapiens
atgcctgaaccagctaagtcagctcctgctccgaagaagggttccaagaaggctgtgaccaaggcgcagaagaaggatggcaagaagcgcaagcgcagtcgtaaggagagctactccgtgtatgtgtacaaggtgctaaaacaggttcaccccgatactggcatctcatccaaggccatgggcatcatgaattccttcgttaacgacatcttcgaacgcatcgcaggcgaggcttcccgtctggcccactacaacaagcgctcgaccattacctccagggagatccagaccgccgtgcgtctgctgcttcccggagagctggccaagcacgcagtgtccgaaggtaccaaggctgtcaccaagtatacaagctccaagtaa

SEQ ID NO: 409 - DNA, 460 bp, Homo sapiens
acatacatgtgcagctggcaaggagagatgctgtgtttcacggtggatttcgcgttgggatttacctgttttgagagtaagaccaagaatgtgctctggagatttaaattttcccagcttaagggatcttcagatgatgggaaaactcgagtaaagctgctgtttcagaatctggacaccaaacagattgagacgaaggaactcgagttccaggacctgagggctgtcctgcactgcatccactccttcatagcagccaaggtggcctccgtggaccccggcttcatggacagtcagagtcttgccagaaaatacatgtacagcagctaaaggttgtttctgttgagtgctgaaaaattaaattattttcgtaagaaatgattctttcctgcagaatattgcaactttgtgttgttttatgatgagcctatagttgtgataccaataaaacatgtcacta

SEQ ID NO: 410 - DNA, 2412 bp, Homo sapiens
atgaagaagcagttcaaccgcatgaagcagctggctaaccagaccgtgggcagagctgagaaaacagaagtccttagtgaagatctattacagattgagagacgcctggacacggtgcggtcaatatgccaccattcccataagcgcttggtggcatgtttccagggccagcatggcaccgatgccgagaggagacacaaaaaactgcctctgacagctcttgctcaaaatatgcaagaagcatcgactcagctggaagactctctcctggggaagatgctggagacgtgtggagatgctgagaatcagctggctctcgagctctcccagcacgaagtctttgttgagaaggagatcgtggaccctctgtacggcatagctgaggtggagattcccaacatccagaagcagaggaagcagcttgcaagattggtgttagactgggattcagtcagagccaggtggaaccaagctcacaaatcctcaggaaccaactttcaggggcttccatcaaaaatagatactctaaaggaagagatggatgaagctggaaataaagtagaacagtgcaaggatcaacttgcagcagacatgtacaactttatggccaaagaaggggagtatggcaaattctttgttacgttattagaagcccaagcagattaccatagaaaagcattagcagtcttagaaaagaccctccccgaaatgcgagcccatcaagataagtgggcggaaaaaccagcctttgggactcccctagaagaacacctgaagaggagcgggcgcgagattgcgctgcccattgaagcctgtgtcatgctgcttctggagacaggcatgaaggaggagggccttttccgaattggggctggggcctccaagttaaagaagctgaaagctgctttggactgttctacttctcacctggatgagttctattcagacccccatgctgtagcaggtgctttaaaatcctatttacgggaattgcctgaacctttgatgacttttaatctgtatgaagaatggacacaagttgcaagtgtgcaggatcaagacaaaaaacttcaagacttgtggagaacatgtcagaagttgccaccacaaaattttgttaactttagatatttgatcaagttccttgcaaagcttgctcagaccagcgatgtgaataaaatgactcccagcaacattgcgattgtgttaggccctaacttgttatgggccagaaatgaaggaacacttgctgaaatggcagcagccacatccgtccatgtggttgcagtgattgaacccatcattcagcatgccgactggttcttccctgaagaggtggaatttaatgtatcagaagcatttgtacctctcaccaccccgagttctaatcactcattccacactggaaacgactctgactcggggaccctggagaggaagcggcctgctagcatggcggtgatggaaggagacttggtgaagaaggaaagtcctcccaaaccgaaggaccctgtatctgcagctgtgccagcaccagggagaaacaacagtcagatagcatctggccaaaatcagccccaggcagctgctggctcccaccagctctccatgggccaacctcacaatgctgcagggcccagcccgcatacactgcgccgagctgttaaaaaacccgctccagcacccccgaaaccgggcaacccacctcctggccaccccgggggccagagttcttcaggaacatctcagcatccacccagtctgtcaccaaagccacccacccgaagcccctctcctcccacccagcacacgggccagcctccaggccagccctccgccccctcccagctctcagcaccccggaggtactccagcagcttgtctccaatccaagctcccaatcacccaccgccgcagccccctacgcaggccacgccactgatgcacaccaaacccaatagccagggccctcccaaccccatggcattgcccagtgagcatggacttgagcagccatctcacacccctccccagactccaacgccccccagtactccgcccctaggaaaacagaaccccagtctgccagctcctcagaccctggcagggggtaaccctgaaactgcacagccacatgctggaaccttaccgagaccgagaccagtaccaaagccaaggaaccggcccagcgtgcccccacccccccaacctcctggtgtccactcagctggggacagcagcctcaccaacacagcaccaacagcttccaagatagtaacagactccaattccagggtttcagaaccgcatcgcagcatctttcctgaaatgcactcagactcagccagcaaagacgtgcctggccgcatcctgctggatatagacaatgataccgagagcactgccctgtga

SEQ ID NO: 411 - DNA, 460 bp, Homo sapiens
ttttgaaataagacattttttattttggcttatttcaggcagcatactgtctatgtgattcatgatactgtggcatgtatcagtgggttgctcattcttacagcgacatagcaattcattagataaatatgtaatgatacatgtatccatttccctttttatggacatttgggtcatttccagttttagggagttatgactatggctgctatacacattcttgtatagatcttttggaagatatgtactcttatttctcttaggtatttacctaggtttgaaatttctgggctataagacttaggagtaggtttaactttaataaatatttggacattaccaaacagtcctccaaactggttaaaccaatgtataccccattagcaatggatgagacttagaattacttcatctcctcaccaatacttgatcctagcttttaaaattttagtcatttcac

SEQ ID NO: 412 - DNA, 1704 bp, Homo sapiens
atggccagtcacgtggacctgctgacggagctgcagctgctggagaaggtgcccacgctggagcggctgcgggctgcccagaagcgccgggcccagcagctgaagaaatgggcacagtacgagcaggacttgcagcaccgcaagcgaaagcatgagcggaagcgcagcacgggcggccgccgcaagaaagtgtccttcgaggccagcgtggccctgctggaggcctcgctgaggaacgacgccgaggaagtacgctacttcctgaagaataaggtcagccctgatttgtgcaatgaggacggactcacagccctacaccagtgctgcatcgacaactttgaggaaattgtgaagctgctcctctcccatggtgccaatgtgaacgccaaggacaacgagctgtggacacctctccatgctgcagccacctgcggccacatcaacctggtgaagatcctcgttcagtatggggccgacttgcttgctgtcaactcggatgggaacatgccatatgacctctgcgaggatgaacccaccctggatgtcatcgagacctgcatggcataccagggcatcacccaagagaaaatcaacgagatgcgggtggctcctgagcagcagatgattgcggacatccactgcatgatcgcagcgggccaggacctggactggatagatgcccagggtgccacactgctgcacatagctggagccaatggatacctgcgggcagctgagctcctcctggaccatggagtgcgtgtggatgtgaaggactgggatggctgggagcccctgcatgcagctgccttctggggacagatgcagatggcagagctattggtgtcccatggagctagtctcagtgcaaggacatccatggatgagatgccaatagacctgtgcgaggaggaagagttcaaggtcctgctgctggagctaaaacacaagcatgatgtgatcatgaagtcacagctgaggcacaagtcatccttgagccggaggacctccagcgcaggcagccgtgggaaggtggtgcggcgagccagcctgtcggacaggaccaacctgtataggaaggagtatgagggagaggccatcctgtggcagcggagtgcagctgaggatcagcggacctccacctacaacggggacatcagggagaccaggacagaccaagagaataaggaccctaaccccaggctggagaagcccgtgctactctccgaatttcctaccaagatcccacgaggtgaactggacatgcctgttgagaatggcctccgggctccggtcagtgcctaccagtatgcgctggccaacggggatgtctggaaggtgcatgaggtgcctgactacagcatggcctatggcaaccctggcgtggccgacgccaccccgccctggagcagctacaaggaacagagccctcagacgcttctggagctgaagcggcagcgggctgcagccaagctgctcagccaccccttccttagcacacacctgggcagcagcatggccaggacgggcgagagtagcagtgaaggcaaggcccccttgatcggaggcagaacttcaccgtacagcagcaatgggacctcggtatattacacggtcaccagcggagatcccccactcttaaagttcaaggcccccatagaggagatggaggagaaggtgcatggctgttgccgtatctcctag

SEQ ID NO: 413 - DNA, 1971 bp, Homo sapiens
atggaggagctcgatggcgagccaacagtcactttgattccaggcgtgaattccaagaagaaccaaatgtattttgactggggtccaggggagatgctggtatgtgaaacctccttcaacaaaaaagaaaaatcagagatggtgccaagttgcccctttatctatatcatccgtaaggatgtagatgtttactctcaaatcttgagaaaactcttcaatgaatcccatggaatctttctgggcctccagagaattgacgaagagttgactggaaaatccagaaaatctcaattggttcgagtgagtaaaaactaccgatcagtcatcagagcatgtatggaggaaatgcaccaggttgcaattgctgctaaagatccagccaatggccgccagttcagcagccaggtctccattttgtcagcaatggagctcatctggaacctgtgtgagattctttttattgaagtggccccagctggccctctcctcctccatctccttgactgggtccggctccatgtgtgcgaggtggacagtttgtcggcagatgttctgggcagtgagaatccaagcaaacatgacagcttctggaacttggtgaccatcttggtgctgcagggccggctggatgaggcccgacagatgctctccaaggaagccgatgccagccccgcctctgcaggcatatgccgaatcatgggggacctgatgaggacaatgcccattcttagtcccgggaacacccagacactgacagagctggagctgaagtggcagcactggcacgaggaatgtgagcggtacctccaggacagcacattcgccaccagccctcacctggagtctctcttgaagattatgctgggagacgaagctgccttgttagagcagaaggaacttctgagtaattggtatcatttcctagtgactcggctcttgtactccaatcccacagtaaaacccattgatctgcactactatgcccagtccagcctggacctgtttctgggaggtgagagcagcccagaacccctggacaacatcttgttggcagcctttgagtttgacatccatcaagtaatcaaagagtgcagcatcgccctgagcaactggtggtttgtggcccacctgacagacctgctggaccactgcaagctcctccagtcacacaacctctatttcggttccaacatgagagagttcctcctgctggagtacgcctcgggactgtttgctcatcccagcctgtggcagctgggggtcgattactttgattactgccccgagctgggccgagtctccctggagctgcacattgagcggatacctctgaacaccgagcagaaagccctgaaggtgctgcggatctgtgagcagcggcagatgactgaacaagttcgcagcatttgtaagatcttagccatgaaagccgtccgcaacaatcgcctgggttctgccctctcttggagcatccgtgctaaggatgccgcctttgccacgctcgtgtcagacaggttcctcagggattactgtgagcgaggctgcttttctgatttggatctcattgacaacctggggccagccatgatgctcagtgaccgactgacattcctgggaaagtatcgcgagttccaccgtatgtacggggagaagcgttttgccgacgcagcttctctccttctgtccttgatgacgtctcggattgcccctcggtctttctggatgactctgctgacagacgccttgccccttttggaacagaaacaggtgattttctcagcagaacagacttatgagttgatgcggtgtctggaggacttgacgtcaagaagacctgtgcatggagaatctgataccgagcagctccaggatgatgacatagagaccaccaaggtggaaatgctgagactttctctggcacgaaatcttgctcgggcaattataagagaaggctcactggaaggttcctga

SEQ ID NO: 414 - DNA, 579 bp, Homo sapiens
atggccccgctgggaggcgccccgcggctggtactgctgttcagcggcaagaggaaatccgggaaggacttcgtgaccgaggcgctgcagagcagacttggagctgatgtctgtgctgtcctccggctctctggtccactcaaggaacagtatgctcaggagcatggcttgaacttccagagactcctggacaccagcacctacaaggaggcctttcggaaggacatgatccgctggggagaggagaaacgccaggctgacccaggcttcttttgcaggaagattgtggagggcatctcccagcccatctggctggtgagtgacacacggagagtgtctgacatccagtggtttcgggaggcctatggggccgtgacgcagacggtccgcgttgtagcgttggagcagagccgacagcagcggggctgggtgttcacgccaggggtggacgatgctgagtcagaatgtggcctggacaacttcggggactttgactgggtcatcgagaaccatggagttgaacagcgcctggaggagcagttggagaacctgatagaatttatccgctccagactttag

SEQ ID NO: 415 - DNA, 221 bp, Homo sapiens
ttttttttttttttttttgaggcaggctttccctcaggttggaatacaattgtgcaatcaaggcaacagagtgtaaagagttaaatgtaacatctgaaactataaaactactagaagaaaagaggagaaaaacttcatgacattgatctggagagcagttttctgaatatgactccacaagcacaggcaatgaaaaaaaaagtaagcacttgccctcgtgc

SEQ ID NO: 416 - DNA, 1863 bp, Homo sapiens
atggcttcagattctatgagtagtaaacaagctaggaatcacattacaaaggggaaaaggcaacaacagcaccagcaaataaagaacagatcctcaattagtgatggtgatggagaagattcctttatttttgaagcaaatgaagcttggaaagattttcatggttctcttcttcgattttatgaaaatggagaactctgtgatgtcacactcaaggttggctcaaagctaatctcttgtcacaagctggtattggcttgtgttattccctactttagagccatgtttctttctgaaatggctgaagccaagcaaacgctgattgagattagagattttgatggtgatgcaatagaagacttggtaaagtttgtctattcttcacggctcactttgactgttgacaatgtccagcctctcttatatgcagcctgtattctgcaggttgaactggtggctagagcttgttgtgaatacatgaagttacattttcatccctccaattgcctggcagtaagagcctttgcagaaagtcacaatcgaatagacttaatggacatggcggatcagtatgcctgtgaccattttactgaagtagtggagtgtgaagactttgtaagtgtatcaccgcagcacctccataagcttttgtcctccagtgatctaaatattgaaaatgaaaagcaggtctataatgctgccatcaagtggcttcttgccaatcctcagcatcattccaaatggttggatgaaacacttgcacaggttcgcctgccattgttgccggttgattttcttatgggtgttgtggcaaaagaacagattgtcaagcaaaatctaaaatgtagagatttactggatgaagcaagaaattaccaccttcacttgagtagcagagcagtacctgactttgaatactccattcggactaccccaaggaagcatactgctggtgtgctgttttgtgtaggtggtcgaggtggatctggtgacccctttcgcagtattgaatgctattctatcaacaaaaacagttggttctttggaccagaaatgaatagtcgaaggcgacatgtgggtgtaatctctgtggaaggtaaagtgtatgcagtaggtggacatgatggaaatgaacatttagggagtatggagatgtttgatcctctcactaataaatggatgatgaaggcatcaatgaacacaaagaggcgaggaattgccttggcttccttaggaggcccaatttatgcaattggagggttagatgacaatacttgcttcaatgatgtggagagatatgacatagaatctgatcagtggagtacagtggcaccaatgaatactccccgtggaggagttggctctgttgctctagtaaaccatgtttatgcagtaggtggcaatgatggaatggcttctttatctagcgtggagagatatgatccacatctggataagtggatagaagttaaagaaatgggtcagcgaagagcaggcaatggagttagcaagcttcatggttgcttatacgtagttggtggttttgatgataattctcctctgagttcagttgagcggtatgacccccgaagcaacaagtgggattatgtggcagcacttactactcccagaggtggagtgggaatcgcaacagtgatgggcaaaatctttgcagttggtggtcataatggcaatgcatacttaaatacagtagaagcgtttgatccagtgctgaataggtgggagcttgttggatctgtgtctcactgcagagctggagcaggagtagctgtgtgttcctgtttaactagccaaattcgagatgtaggtcatggatccaataatgtggttgactgtatgtga

SEQ ID NO: 417 - DNA, 980 bp, Homo sapiens
aacctcataggtggtttgggatgtcttttggctgtgcttaaaaatttccaacagatttgctacacatcttaggataaatatgtttcctgtgaattgtgatgatttcttacagtacatttgcaagcatgtgtatgcatctgcaggaaacatagcctggctctgtgaaggaatactgctgtgaccgcaaaactgtttctgtagaattttctccggtgtggtcatcctgccttcagaggtttctccaggacgtcacctgtatgaggtacacagtgtgatgacacactctgtgcttttcctacttgtgtccacggctcaagcctggaagaagccttaggacgtgggggaaatgtctaacgtggagtccacctgctgagcaggaccgggtgtgaaggaagaagctttgttctgattcctcatggcccagccacccctcgcctgagctgagcctggccacagggcccgcctgcaggaagggctggcccatggcttcacactgggctcaggctgcgctaagagccccgggtgaggacctccaagcccaggaagcctcagttggccaaagtgctagatgcgtgtggtctgctttcatccccgcttccctcagagcttgcattttccaaattcaagagaggctccaccttcaagaagaccggcctgtccctgttatttatgtgtccccctaccatatctccctttgttctgcagagcggccatacctgccagcagcctgctctcccggccatgctgcggttcacaaaagtccagcatttggctagcttcctgggggaatgaatctttcagagccaaactaatgctatgcatgcagcttatgatttttttttttttgtcttcaacaaagtgaatacttactttttttttgctctttaaaaaaaaaaaaaaaaaaaaaaaaaaaaaaaaaaaaaaaaaaaaaaaaaaaaaaaaaaaaaaaaaaaaaaaaaaaaaaaaaaaaaaaaaaaaaa

SEQ ID NO: 418 - DNA, 3078 bp, Homo sapiens
atgcatcggaaaaaggtggataaccgaatccggattctcattgagaatggagtagctgagcggcaaagatctctctttgttgtagttggggatcgaggaaaagatcaggtggtaatacttcatcacatgttatccaaagcaactgtgaaggctcggccttcagtgctgtggtgttataagaaagagctggggtttagcagtcaccggaagaaaagaatgcgacagctgcagaagaaaataaagaatggaacactgaacataaagcaggacgacccctttgaactcttcatagcagccacaaacattcgctactgctactacaacgagacccacaagatcctgggcaataccttcggcatgtgtgtgctgcaggattttgaagccttaactccaaacttgctggccaggactgtagaaacagtggaaggtggtgggctagtggtcatcctcctacggaccatgaactcactcaagcaattgtacacagtgactatggatgtgcattccaggtacagaactgaggcccatcaggatgtggtgggaagatttaatgaaaggtttattctgtctctggcctcttgtaagaagtgtctcgtcattgatgaccagctcaacatcctgcccatctcctcccacgttgccaccatggaggccctgcctccccagactccggatgagagtcttggtccttctgatctggagctgagggagttgaaggagagcttgcaggacacccagcctgtgggtgtgttggtggactgctgtaagactctagaccaggccaaagctgtcttgaaatttatcgagggcatctctgaaaagaccctgaggagtactgttgcactcacagctgctcgaggacggggaaaatctgcagccctgggattggcgattgctggggcggtggcatttgggtactccaatatctttgttacctccccaagccctgataacctccatactctgtttgaatttgtatttaaaggatttgatgctctgcaatatcaggaacatctggattatgagattatccagtctctaaatcctgaatttaacaaagcagtgatcagagtgaatgtatttcgagaacacaggcagactattcagtatatacatcctgcagatgctgtgaagctgggccaggctgaactagttgtgattgatgaagctgccgccatccccctccccttggtgaagagcctacttggcccctaccttgttttcatggcatccaccatcaatggctatgagggcactggccggtcactgtccctcaagctaattcagcagctccgtcaacagagcgcccagagccaggtcagcaccactgctgagaataagaccacgacgacagccagattggcatcagcgcggacactgtatgaggtttccctccaggagtcaatccgatacgcccctggggatgcagtggagaagtggctgaatgacttgctgtgcctggattgcctcaacatcactcggatagtctcaggctgccccttgcctgaagcttgtgaactgtactatgttaatagagataccctcttttgctaccacaaggcctctgaagttttcctccaacggcttatggccctctacgtggcttctcactacaagaactctcccaatgatctccagatgctctccgatgcacctgctcaccatctcttctgccttctgcctcccgtgccccccacccagaatgcccttccagaagtgcttgctgttatccaggtgtgccttgaaggggagatttctcgccagtccatcttgaacagtctgtctcgaggcaagaaggcttcaggggacctgattccatggacagtgtcagaacagttccaagatccagactttggtggtctgtctggtggaagggtcgttcgcattgctgttcacccagattatcaagggatgggctatggcagccgtgctctgcagctgctgcagatgtactatgaaggcaggtttccttgtctggaggaaaaggtccttgagacaccacaggaaattcacaccgtaagcagcgaggctgtcagcttgttggaagaggtcatcactccccggaaggacctgcctcctttactcctcaaattgaatgagaggcctgccgaacgcctggattacctgggtgtttcctatggcttgacccccaggctcctcaagttctggaaacgagctggatttgttcctgtttatctgagacagaccccgaatgacctgaccggagagcactcgtgcatcatgctgaagacgctcactgatgaggatgaggctgaccagggaggctggcttgcagccttctggaaagatttccgacggcggttcctagccttgctctcctaccagttcagtaccttctctccttccctggctctgaacatcattcagaacaggaacatggggaagccagcccagcctgccctgagccgggaggagctggaagcactcttcctcccctatgacctgaagcggctggagatgtattcacggaatatggtggactatcacctcatcatggacatgatcccggccatctctcgcatctatttcctgaaccagctgggggacctggccctgtctgcggctcagtcggctcttctcttggggattggcctgcagcataagtctgtggaccagctggaaaaggagattgagctgccctcgggccagttgatgggacttttcaaccggatcatccgcaaagttgtgaagctatttaatgaagttcaggaaaaggccattgaggagcagatggtggcagcgaaggatgtggtcatggagcccacgatgaagaccctcagtgacgacctagatgaagcagcaaaggaatttcaggagaaacacaagaaggaagtagggaagctgaagagcatggacctctctgaatacataatccgtggggacgatgaagagtggaatgaagttttgaacaaagctgggccgaacgcctcgatcatcagcctgaaaagtgacaagaaaaggaagttagaggccaaacaagaacccaaacagagcaagaagttgaagaacagagagacaaagaacaaaaaagatatgaaactgaagcggaagaaatag

SEQ ID NO: 419 - DNA, 960 bp, Homo sapiens
atggggatttggcagcgtctgctgctttttggtggggtgtcgctccgggctggtggcggggccactgccccgcttgggggaagccgagcgatggtttgtgggcgccagttgtctggcgccgggagtgagaccctaaaacaaagaagaacacaaatcatgtcccgaggacttccaaagcagaaaccgatagaaggtgttaaacaagttatagttgtggcttctggaaagggtggagtcggaaaatctactacagcagtgaatcttgcacttgcactagcagcgaacgattcgtccaaggccattggtttgctagatgtggatgtgtatggaccttcagttccaaagatgatgaatctgaaaggaaatccggaattatcacagagcaacctaatgaggcctctcttgaattatggtattgcttgtatgtctatgggctttctggttgaagaaagtgaaccagtagtttggagaggccttatggtaatgtcggccattgagaaattgttgaggcaggtagattggggtcaactggactacttagttgtagacatgccaccaggaactggagatgtgcagttatcagtctcacagaatattcctataacaggtgctgtgattgtctccacgccccaggacatcgcattgatggatgcacacaagggtgctgagatgtttcgcagagtccacgtgcccgtccttggccttgtccaaaacatgagtgttttccagtgtccaaaatgtaaacacaaaactcatatttttggtgctgatggtgcaaggaaactagcacagacccttggtcttgaagttctaggagacattcccttacaccttaatataagggaagcttcagatacaggccagccaattgtgttttcacagcctgaaagtgatgaggccaaagcttacttgaggattgctgtggaagtggtaagaagattgccatcaccttcagaatga

SEQ ID NO: 420 - DNA, 1020 bp, Homo sapiens
atgatggattctcagctggtagctggtgttgcattcaagaagactttctcttacgctgggtttgaaatgcaacccaaaaagtaccacaatcccaagattgcccttttgaatgtcgagctcgagttgaaagctgagaaagacaatgctgagataagagtccacacagttgaggattatcaggcaattgttgatgctgagtggaacattctctatgacaagttagagaagatccatcattctggagccaaagttgtcttgtccaaactccccattggggatgtggccacccagtactttgctgacagggacatgttctgtgctggccgagtacctgaggaggatctgaagaggacaatgatggcctgtggaggctcaatccagaccagtgtgaatgctctgtcagcagatgtgctgggtcgatgccaggtgtttgaagagacccagattggaggcgagaggtacaatttttttactggctgccccaaggccaagacatgcaccttcattctccgtggcggcgccgagcagtttatggaggagacagagcggtccctgcatgatgccatcatgatcgtcaggagggccatcaagaatgattcagtggtggctggtggcggggccattgagatggaactctccaagtacctgcgggattactcaaggactattccaggaaaacagcagctgttgattggggcatatgccaaggccttggagattatcccacgccagctgtgtgacaatgctggctttgatgccacaaacattctcaacaagctgcgggctcggcatgcccaggggggtacatggtatggagtagacatcaacaacgaggacattgctgacaactttgaagctttcgtgtgggagccagctatggtgcggatcaatgcgctgacagcagcctctgaggctgcgtgcctgatcgtgtctgtagatgaaaccatcaagaacccccgctcgactgtggatgctcccacagcagcaggccggggccgtggtcgtggccgcccccactga

SEQ ID NO: 421 - DNA, 1389 bp, Homo sapiens
atggagagcaccccttcaaggggactgaaccgagtacacctacaatgcaggaatctgcaggaattcttagggggcctgagccctggggtattggaccgattgtatgggcaccctgccacatgtctggctgtcttcagggagctcccatccttggctaagaactgggtgatgcggatgctctttctggagcagcctttgccacaggctgctgtagctctgtgggtaaagaaggaattcagcaaggctcaggaggaaagtacagggctgctgagcggcctccggatctggcacacacagctgctcccaggcgggctccagggcctcatcctcaaccccattttccgccagaacctccgcattgcccttctgggtggggggaaggcctggtctgatgacacaagtcagctgggaccagacaagcatgcccgggacgttccctcccttgacaagtacgccgaggagcgatgggaggtggtcttgcacttcatggtgggctcccccagtgcagctgtcagccaggacttggctcagctcctcagccaggctgggctcatgaagagtactgaacctggagagccgccctgcattacttccgctggcttccagttcctgttgctggacaccccggctcagctctggtactttatgttgcagtatttgcagacagcccagagccggggcatggacctggtagagattctctccttcctcttccagctcagcttctctactctgggcaaggattactctgtggaaggtatgagtgattctctgttgaacttcctgcaacatctgcgtgagtttgggcttgttttccagaggaagaggaaatctcggcgttactaccccacacgcctggccatcaatctctcatcaggtgtctctggagctgggggcactgtgcatcagccaggtttcattgtcgtggaaaccaattaccgactgtatgcctacacggagtcggagctgcagattgccctcattgccctcttctctgagatgctctatcggttccccaacatggtggtggcgcaggtgacccgggagagtgtgcagcaggcaatcgccagtggcatcacagcccagcagataatccatttcctaaggacaagagcccacccagtgatgctcaaacagacacctgtgctgccccccaccatcaccgaccagatccggctctgggagctggaaagggacagactccggttcactgagggtgtcctgtataaccagttcctgtcgcaagtggactttgagctgctgctggcccacgcgcgggagctgggcgtgctcgtgttcgagaactcggccaagcggctcatggtggtgaccccggccgggcacagcgacgtcaagcgcttttggaagcggcagaaacatagctcctga

SEQ ID NO: 422 - DNA, 697 bp, Homo sapiens
ttttttttttttttttttcactttgagattttgtcttttattacactaatctattttctttatgatgtaacacactgacatcttactttaaaatacatctgagggcatctggaagtttagactaatttcataataatatagaagattattcatatatcatgtacttattgttacctcgatcaaatgaatcaataaataatgttttaaaaattcttagttcaagtttctgcaaggtaaatattgatagtttttcccacaaagacaaaggtttttaggggattcatcaaaaagttttagctcgtacaagcatctgaatgcaaaacatgtagatgcgcacacacacacacacacacgctcaaccctccgttttttgaaaagcagaaagcaagcattgttatatttctatatcactatttctcctaagtatggtcaaaaccacttacaatgattataacttttaactattgtaactcaatattagtaggttaatcctcctggtttttataggttttggcactaaaagtcctacatcccaagagaacttcttagtttgttttcttagctccagacaaattcacaggcggagtgaagaattgagaattgtctttcatacaccagtaccttagcagacttgcagagcttacggctgcatggaacacagctttctgcaactacaaatgtttcatgcatagcttct

SEQ ID NO: 423 - DNA, 411 bp, Homo sapiens
atggctcgtaccaagcagactgctcgcaagtccacgggtgggaaagcgccacgcaagcagctggccaccaaggctgctcgaaagagcgctccagccaccggcggcgtgaagaagccccaccgttaccggcccggcacggtggctctgcgcgagatccgccgctaccagaagtcgaccgagctgctgattcgcaaactgccattccagcgtctagtccgtgagatcgcgcaggacttcaagactgatctgcgttttcagagctcggcggtgatggcgctgcaggaggcctgcgaggcctacctggtggggctgtttgaggacaccaacctatgcgccattcacgccaagcgagtgactatcatgcccaaggacatccagcttgctcgccgcattcgtggggagagggcgtaa

SEQ ID NO: 424 - DNA, 1314 bp, Homo sapiens
atggccttggccggggcccctgcgggcggcccatgcgcgccggcgctggaggccctgctcggggccggcgcgctgcggctgctcgactcctcgcagatcgtcatcatctccgccgcgcaggacgccagcgccccgccggctcccaccggccccgcggcgcccgccgccggcccctgcgaccctgacctgctgctcttcgccacaccgcaggcgccccggcccacacccagtgcgccgcggcccgcgctcggccgcccgccggtgaagcggaggctggacctggaaactgaccatcagtacctggccgagagcagtgggccagctcggggcagaggccgccatccaggaaaaggtgtgaaatccccgggggagaagtcacgctatgagacctcactgaatctgaccaccaagcgcttcctggagctgctgagccactcggctgacggtgtcgtcgacctgaactgggctgccgaggtgctgaaggtgcagaagcggcgcatctatgacatcaccaacgtccttgagggcatccagctcattgccaagaagtccaagaaccacatccagtggctgggcagccacaccacagtgggcgtcggcggacggcttgaggggttgacccaggacctccgacagctgcaggagagcgagcagcagctggaccacctgatgaatatctgtactacgcagctgcgcctgctctccgaggacactgacagccagcgcctggcctacgtgacgtgtcaggaccttcgtagcattgcagaccctgcagagcagatggttatggtgatcaaagcccctcctgagacccagctccaagccgtggactcttcggagaactttcagatctcccttaagagcaaacaaggcccgatcgatgttttcctgtgccctgaggagaccgtaggtgggatcagccctgggaagaccccatcccaggaggtcacttctgaggaggagaacagggccactgactctgccaccatagtgtcaccaccaccatcatctcccccctcatccctcaccacagatcccagccagtctctactcagcctggagcaagaaccgctgttgtcccggatgggcagcctgcgggctcccgtggacgaggaccgcctgtccccgctggtggcggccgactcgctcctggagcatgtgcgggaggacttctccggcctcctccctgaggagttcatcagcctttccccaccccacgaggccctcgactaccacttcggcctcgaggagggcgagggcatcagagacctcttcgactgtgactttggggacctcacccccctggatttctga

SEQ ID NO: 425 - DNA, 2061 bp, Homo sapiens
atggcggaccggcggcgcgcgtggaacaccgaggacgacctgcccgtgtacctggcgcggccgggcagcgcggcgcagaccccgcgccagaagtacggcggcatgttcgccgcggtggagggcgcctacgagaacaagaccatcgacttcgacgcctacagtgtgggccgccgcggctcggcgcgcacgccgcgcagcgctggccggcccgacgcggtcgggctgccagggccgggaggcagcgaggacacggccagcgacgtgagcgagccctcgggctccgcggtcagctctcccggagagcgcgacgagcggccgccgacgctgcgcatccgccgccccgcgccccgcgacctgcccctcggccgggacaatggccagagtgaccgactcctcatcaaaggtggacggatcatcaacgatgaccaatccctttatgctgacgtctacctggaggatggacttatcaaacaaataggagagaacttaatcgttcctggtggagtgaagaccattgaagccaacgggcggatggttattcccggaggtattgatgtcaacacgtacctgcagaagccctcccaggggatgactgcggctgatgacttcttccaagggaccagggcggcactggtgggcgggaccacgatgatcattgaccatgttgttcctgaacctgggtccagcctactgacctctttcgagaagtggcacgaagcagctgacaccaaatcctgctgtgattactccctccacgtggacatcacaagctggtacgatggcgttcgggaggagctggaggtgctggtgcaggacaaaggcgtcaattccttccaagtctacatggcctataaggatgtctaccaaatgtccgacagccagctctatgaagcctttaccttccttaagggcctgggagctgtgatcttggtccatgcagaaaatggagatttgatagctcaggaacaaaagcggatcctggagatgggcatcacgggtcccgagggccatgccctgagcagacctgaagagctggaggccgaggcggtgttccgggccatcaccattgcgggccggatcaactgccctgtgtacatcaccaaggtcatgagcaagagtgcagccgacatcatcgctctggccaggaagaaagggcccctagtttttggagagcccattgccgccagcctggggaccgatggcacccattactggagcaagaactgggccaaggctgcggcgttcgtgacttcccctcccctgagcccggaccctaccacgcccgactacttgacctccctactggcctgtggggacttgcaggtcacaggcagcggccactgtccctacagcactgcccagaaggcggtgggcaaggacaactttaccctgatccccgagggtgtcaacgggatagaggagcggatgacggtcgtctgggacaaggcggtggctactggcaaaatggatgagaaccagtttgtcgctgtcaccagcaccaatgcagccaagatctttaacctgtacccaaggaaagggcggattgccgtgggctcggatgccgacgtggtcatctgggaccccgacaagttgaagaccataacagccaaaagtcacaagtcggcggtggagtacaacatcttcgagggtatggagtgccacggctccccactagtggtcatcagccagggcaagatcgtctttgaagacggaaacatcaacgtcaacaagggcatgggccgcttcattccgcggaaggcgttcccggagcacctgtaccagcgcgtcaaaatcaggaataaggtttttggattgcaaggggtttccaggggcatgtatgacggtcctgtgtacgaggtaccagctacacccaaatatgcaactcccgctccttcagccaaatcttcgccttctaaacaccagcccccacccatcagaaacctccaccagtccaacttcagcttatcaggtgcccagatagatgacaacaatcccaggcgcaccggccaccgcatcgtggcgccccctggtggccgctccaacatcaccagcctcggttga

SEQ ID NO: 426 - DNA, 465 bp, Homo sapiens
atggcggggccggtgaaggaccgcgaggccttccagaggctcaacttcctgtaccaggccgcccattgtgtccttgcccaggaccccgagaaccaggcgctggcgaggttttactgctacactgagaggaccattgcgaagcggctcgtcttgcggcgggatccctcggtgaagaggactctctgtcgaggctgctcttccctcctcgtcccgggcctcacctgcacccagcgccagagacgctgcaggggacagcgctggaccgtacagacctgcctaacatgccagcgcagccaacgcttcctcaatgatcccgggcatttactctggggagacaggcctgaggcccagctcgggagccaagcagattccaaaccactacaacccttgccaaacacagcccactccatttcagaccgccttcctgaggagaaaatgcagactcagggttccagtaaccagtga

SEQ ID NO: 427 - DNA, 3228 bp, Homo sapiens
atgactactgcaaactgtggcgcccacgacgagctcgacttcaaactcgtctttggcgaggacggggcgccggcgccgccgcccccgggctcgcggcctgcagatcttgagccagatgattgtgcatccatttacatctttaatgtagatccacctccatctactttaaccacaccactttgcttaccacatcatggattaccgtctcactcttctgttttgtcaccatcgtttcagctccaaagtcacaaaaactatgaaggaacttgtgagattcctgaatctaaatatagcccattaggtggtcccaaaccctttgagtgcccaagtattcaaattacatctatctctcctaactgtcatcaagaattagatgcacatgaagatgacctacagataaatgacccagaacgggaatttttggaaaggccttctagagatcatctctatcttcctcttgagccatcctaccgggagtcttctcttagtcctagtcctgccagcagcatctcttctaggagttggttctctgatgcatcttcttgtgaatcgctttcacatatttatgatgatgtggactcagagttgaatgaagctgcagcccgatttacccttggatcccctctgacttctcctggtggctctccagggggctgccctggagaagaaacttggcatcaacagtatggacttggacactcattatcacccaggcaatctccttgccactctcctagatccagtgtcactgatgagaattggctgagccccaggccagcctcaggaccctcatcaaggcccacatccccctgtgggaaacggaggcactccagtgctgaagtttgttatgctgggtccctttcaccccatcactcacctgttccttcacctggtcactcccccaggggaagtgtgacagaagatacgtggctcaatgcttctgtccatggtgggtcaggccttggccctgcagtttttccatttcagtactgtgtagagactgacatccctctcaaaacaaggaaaacttctgaagatcaagctgccatactaccaggaaaattagagctgtgttcagatgaccaagggagtttatcaccagcccgggagacttcaatagatgatggccttggatctcagtatcctttaaagaaagattcatgtggtgatcagtttctttcagttccttcaccctttacctggagcaaaccaaagcctggccacacccctatatttcgcacatcttcattacctccactagactggcctttaccagctcattttggacaatgtgaactgaaaatagaagtgcaacctaaaactcatcatcgagcccattatgaaactgaaggtagccgaggggcagtaaaagcatctactgggggacatcctgttgtgaagctcctgggctataacgaaaagccaataaatctacaaatgtttattgggacagcagatgatcgatatttacgacctcatgcattttaccaggtgcatcgaatcactgggaagacagtcgctactgcaagccaagagataataattgccagtacaaaagttctggaaattccacttcttcctgaaaataatatgtcagccagtattgattgtgcaggtattttgaaactccgcaattcagatatagaacttcgaaaaggagaaactgatattggcagaaagaatactagagtacgacttgtgtttcgtgtacacatcccacagcccagtggaaaagtcctttctctgcagatagcctctatacccgttgagtgctcccagcggtctgctcaagaacttcctcatattgagaagtacagtatcaacagttgttctgtaaatggaggtcatgaaatggttgtgactggatctaattttcttccagaatccaaaatcatttttcttgaaaaaggacaagatggacgacctcagtgggaggtagaagggaagataatcagggaaaaatgtcaaggggctcacattgtccttgaagttcctccatatcataacccagcagttacagctgcagtgcaggtgcacttttatctttgcaatggcaagaggaaaaaaagccagtctcaacgttttacttatacaccagttttgatgaagcaagaacacagagaagagattgatttgtcttcagttccatctttgcctgtgcctcatcctgctcagacccagaggccttcctctgattcagggtgttcacatgacagtgtactgtcaggacagagaagtttgatttgctccatcccacaaacatatgcatccatggtgacctcatcccatctgccacagttgcagtgtagagatgagagtgttagtaaagaacagcatatgattccttctccaattgtacaccagccttttcaagtcacaccaacacctcctgtggggtcttcctatcagcctatgcaaactaatgttgtgtacaatggaccaacttgtcttcctattaatgctgcctctagtcaagaatttgattcagttttgtttcagcaggatgcaactctttctggtttagtgaatcttggctgtcaaccactgtcatccataccatttcattcttcaaattcaggctcaacaggacatctcttagcccatacacctcattctgtgcataccctgcctcatctgcaatcaatgggatatcattgttcaaatacaggacaaagatctctttcttctccagtggctgaccagattacaggtcagccttcgtctcagttacaacctattacatatggtccttcacattcagggtctgctacaacagcttccccagcagcttctcatcccttggctagttcaccgctttctgggccaccatctcctcagcttcagcctatgccttaccaatctcctagctcaggaactgcctcatcaccgtctccagccaccagaatgcattctggacagcactcaactcaagcacaaagtacgggccaggggggtctttctgcaccttcatccttaatatgtcacagtttgtgtgatccagcgtcatttccacctgatggggcaactgtgagcattaaacctgaaccagaagatcgagagcctaactttgcaaccattggtctgcaggacatcactttagatgatgtgaacgagataattgggagagacatgtcccagatttctgtttcccaaggagcaggggtgagcaggcaggctcccctcccgagtcctgagtccctggatttaggaagatctgatgggctctaa

SEQ ID NO: 428 - DNA, 1863 bp, Homo sapiens
gggaaaactatcgtccagaccctgaatcctccggctgtactgccaagtcatttcctagggccgcactcaaggtgtcagactcacgtgggctcatcactgcgtcctctcatattttcaatatgaatgacttttatcaggaaatctgaaaattagtgaaaggttcatttttctcagcatccggaaggctcgaagggcaggcaggaggggcgcgaacaggggctttgccctcctggagagacagcatgaacacagatgttcccagcgcaggcgaaggagaatgctggcttcagcggttgtgggggaggtaggcaggaatgttgcttttctggacattcgttctaaattagcgcctgtgtacccagggctgggtataaactgaggagtaagacattgtccctgctcctatggagcgtggagtgcatcagaggagacaaatgcagaaaaattacattttagtggagtaaatgaagactggctactcggatcggcgcttagcctggtgggacgccaggcacgggaagcggaacctaagtgtcgaagacacagagattgactggaaggcctacatggccgaggtagaaggcgtcatcaatggtacctatgactatacccaactgcagggtgacaccggaccacttgtgtacccagctggtttcgtgtacatctttatggggttgtactatgccaccagccgaggcactgacatccgcatggcccagaacatctttgctgtgctctacctggctaccttgctgcttgtcttcttgatctatcaccagacctgcaaggtacctcccttcgtctttttcttcatgtgctgcgcctcttaccgtgtccactccatctttgtgctgcggctcttcaatgacccagtggccatggtgctgctcttcctcagtatcaacctcctgctggcccagcgctggggctggggttgctgctttttcagcctggcagtctctgtgaagatgaatgtgctgctcttcgcccctgggttactgtttcttctcctcacacagtttggcttccgtggggccctccccaagctgggaatctgtgctggccttcaggtggtgctggggctgcccttcctgctggagaaccccagcggctacctgtcccgctcctttgaccttggccgccagtttctgttccactggacagtgaactggcgcttcctcccagaggcgctcttcctgcatcgagccttccacctggccctgttgactgcccacctcaccctgctcctgctgtttgccctctgcaggtggcacaggacaggggaaagtatcttgtcgctgctgagggatccctccaaaaggaaggttccaccccagccccttacacccaaccagatcgtttctaccctcttcacctccaacttcattggcatctgcttcagccgctccctccactaccagttctacgtctggtatttccacacactgccctacctcctgtgggccatgcctgcacgctggctcacacacctgctcaggttgttggtgctggggctcatcgagctctcctggaacacatacccttccacatcctgcagctctgctgccctgcacatatgccatgccgtcatcctgctgcagctctggctgggcccgcagcctttccccaagagcacccaacacagcaagaaagcccactgaagtccacccctttccctcaggacctgagtctaccctcaggacctggggttggttggactctgcccttccaaataaaccttgctaagtccaactctgtgcaacctacatggaggtgggggcagccgatgcctggtccaggctgtgagggacacgtatggagcagataaagaattcactcaagcagtaaaaaaaaaaaaaaaaa

SEQ ID NO: 429 - DNA, 1701 bp, Homo sapiens
atgagaaggcagtgggggtctgccatgagggcggccgagcaggcgggctgcatggtgagcgcctcccgggccggacagcccgaggcgggcccgtggagctgcagcggggtaatcctgagccgtagcccgggcctggtgctttgccacgggggcatcttcgtccccttcctgcgagctggcagcgaagtcctgaccgcggccggcgccgtcttcctgcctggcgacagttgcagggacgacctgcgcctgcacgtgcagtgggccccaacggccgcgggtcccgggggcggcgcggagcggggccgcccagggctgtgcacgccccagtgcgcgagcctcgagcccggcccacctgccccgtcccgcgggcgtcccctgcagccccggcttcctgctgagctgctgctgctgctgagctgcccggccttctgggcccacttcgcgcgcctcttcggggacgaggcagcggaacagtggcgcttctcgagcgcggcgcgggatgacgaagtgtcggaggacgaggaggcggatcaactgagagcgctgggctggtttgcgctgctgggcgtgcggctaggccaggaggaggtggaggaggagcgcgggccagccatggcggtgtcgcctctcggggccgtgcccaagggtgcgccattgctggtctgcggctcccctttcggcgccttctgccccgacatctttctcaacacgctgagctgcggggtgctcagcaacgtggccggcccactgctgcttaccgacgcacgctgcctgcccggcaccgagggcggcggcgtgttcaccgcgcggcccgcgggggcgctggtggcgctggtggtggcgccgctctgttggaaggccggcgaatgggtgggcttcacgctgctctgcgccgccgccccccttttccgcgccgcccgcgacgcgcttcaccgcctgccgcacagcaccgctgccctggccgcccttctgccgccagaggtgggcgtcccgtggggtctgcccctccgagactccgggcccctgtgggcagccgcggcagtgttggtggagtgcggcaccgtatggggctccggagtggctgtggcaccccgccttgtagtgacctgtcggcacgtgtcccctcgggaagcagccagggtcctggtgcgctccaccacccccaagagtgtggccatctggggccgtgtggtatttgccactcaggagacatgtccctatgacatagcagtggtgagcctggaggaggacctggatgatgtccccatccctgtgcccgctgagcacttccatgaaggcgaggctgtgagtgtggtgggctttggcgtctttggccagtcttgcgggccctcggtgacctcaggcatcctttcggctgtggtgcaggtgaatggcacgcccgtaatgctgcagaccacgtgtgctgtgcacagcggctccagtgggggacccctcttctccaaccactcaggaaacctccttggcataatcaccagcaacacccgggacaataatacgggggccacctacccccacctgaacttcagcattcccatcacggtgctccagccggccctgcagcagtacagccagacccaagacctaggtggcctccgtgagctggaccgcgctgctgagccagtcagggtggtgtggcggttgcagcggcccctggcagaggccccgcggagcaagctctga

SEQ ID NO: 430 - DNA, 3384 bp, Homo sapiens
tgtttatactccggagggtgtccccgtgcgtcatcggtggagtggaccaaaactggtgatctgtttgccctgtgtgaccttgcccagaaccctgctgactgagagaacacatctgctggaagtcctctgggattcaaggtacagggaatgaagagtagttttacagaaaaaagaggacaatattgggatcacctttgacctttccatttggaaataatattttctattgtgttatagaaaggtgggaagctttcatccagaacaatgaatttcataaaggacaatagccgagcccttattcaaagaatgggaatgactgttataaagcaaatcacagatgacctatttgtatggaatgttctgaatcgcgaagaagtaaacatcatttgctgcgagaaggtggagcaggatgctgctagagggatcattcacatgattttgaaaaagggttcagagtcctgtaacctctttcttaaatcccttaaggagtggaactatcctctatttcaggacttgaatggacaaagtctttttcatcagacatcagaaggagacttggacgatttggctcaggatttaaaggacttgtaccataccccatcttttctgaacttttatccccttggtgaagatattgacattatttttaacttgaaaagcaccttcacagaacctgtcctgtggaggaaggaccaacaccatcaccgcgtggagcagctgaccctgaatggcctcctgcaggctcttcagagcccctgcatcattgaaggggaatctggcaaaggcaagtccactctgctgcagcgaattgccatgctctggggctccggaaagtgcaaggctctgaccaagttcaaattcgtcttcttcctccgtctcagcagggcccagggtggactttttgaaaccctctgtgatcaactcctggatatacctggcacaatcaggaagcagacattcatggccatgctgctgaagctgcggcagagggttcttttccttcttgatggctacaatgaattcaagccccagaactgcccagaaatcgaagccctgataaaggaaaaccaccgcttcaagaacatggtcatcgtcaccactaccactgagtgcctgaggcacatacggcagtttggtgccctgactgctgaggtgggggatatgacagaagacagcgcccaggctctcatccgagaagtgctgatcaaggagcttgctgaaggcttgttgctccaaattcagaaatccaggtgcttgaggaatctcatgaagacccctctctttgtggtcatcacttgtgcaatccagatgggtgaaagtgagttccactctcacacacaaacaacgctgttccataccttctatgatctgttgatacagaaaaacaaacacaaacataaaggtgtggctgcaagtgacttcattcggagcctggaccactgtggagacctagctctggagggtgtgttctcccacaagtttgatttcgaactgcaggatgtgtccagcgtgaatgaggatgtcctgctgacaactgggctcctctgtaaatatacagctcaaaggttcaagccaaagtataaattctttcacaagtcattccaggagtacacagcaggacgaagactcagcagtttattgacgtctcatgagccagaggaggtgaccaaggggaatggttacttgcagaaaatggtttccatttcggacattacatccacttatagcagcctgctccggtacacctgtgggtcatctgtggaagccaccagggctgttatgaagcacctcgcagcagtgtatcaacacggctgccttctcggactttccatcgccaagaggcctctctggagacaggaatctttgcaaagtgtgaaaaacaccactgagcaagaaattctgaaagccataaacatcaattcctttgtagagtgtggcatccatttatatcaagagagtacatccaaatcagccctgagccaagaatttgaagctttctttcaaggtaaaagcttatatatcaactcagggaacatccccgattacttatttgacttctttgaacatttgcccaattgtgcaagtgccctggacttcattaaactggacttttatgggggagctatggcttcatgggaaaaggctgcagaagacacaggtggaatccacatggaagaggccccagaaacctacattcccagcagggctgtatctttgttcttcaactggaagcaggaattcaggactctggaggtcacactccgggatttcagcaagttgaataagcaagatatcagatatctggggaaaatattcagctctgccacaagcctcaggctgcaaataaagagatgtgctggtgtggctggaagcctcagtttggtcctcagcacctgtaagaacatttattctctcatggtggaagccagtcccctcaccatagaagatgagaggcacatcacatctgtaacaaacctgaaaaccttgagtattcatgacctacagaatcaacggctgccgggtggtctgactgacagcttgggtaacttgaagaaccttacaaagctcataatggataacataaagatgaatgaagaagatgctataaaactagctgaaggcctgaaaaacctgaagaagatgtgtttatttcatttgacccacttgtctgacattggagagggaatggattacatagtcaagtctctgtcaagtgaaccctgtgaccttgaagaaattcaattagtctcctgctgcttgtctgcaaatgcagtgaaaatcctagctcagaatcttcacaatttggtcaaactgagcattcttgatttatcagaaaattacctggaaaaagatggaaatgaagctcttcatgaactgatcgacaggatgaacgtgctagaacagctcaccgcactgatgctgccctggggctgtgacgtgcaaggcagcctgagcagcctgttgaaacatttggaggaggtcccacaactcgtcaagcttgggttgaaaaactggagactcacagatacagagattagaattttaggtgcattttttggaaagaaccctctgaaaaacttccagcagttgaatttggcgggaaatcgtgtgagcagtgatggatggcttgccttcatgggtgtatttgagaatcttaagcaattagtgttttttgactttagtactaaagaatttctacctgatccagcattagtcagaaaacttagccaagtgttatccaagttaacttttctgcaagaagctaggcttgttgggtggcaatttgatgatgatgatctcagtgttattacaggtgcttttaaactagtaactgcttaaataaagtgtactcgaagccagtaaaaaaaaaaaaaaaaaaaaaaa

SEQ ID NO: 431 - DNA, 3111 bp, Homo sapiens
gcgagttgtgtgagccgccagtatggccgggctatggcggcgagcactggctacgtgcgactgtggggagcggcgcggtgctgggtgctgcggcggccgatgctggccgccgccggggggcgggttcccactgcagcaggagcgtggttgctccgaggccagcggacctgcgacgcctctcctccttgggcactgtggggccgaggcccggcaattgggggccaatggcgggggttttgggaagcgagcagccgcggcggaggcgcattctcggggggcgaggacgcctccgagggcggcgcggaggaaggagccggcggcgcggggggcagcgcgggcgccggggaaggcccggtcataacggcgctcacgcccatgacgatccccgatgtgtttccgcacctgccgctcatcgccatcacccgcaacccggtgttcccgcgctttatcaagattatcgaggttaaaaataagaagttggttgagctgctgagaaggaaagttcgtctcgcccagccttatgtcggcgtctttctaaagagagatgacagcaatgagtcggatgtggtcgagagcctggatgaaatctaccacacggggacgtttgcccagatccatgagatgcaggaccttggggacaagctgcgcatgatcgtcatgggacacagaagagtccatatcagcagacagctggaggtggagcccgaggagccggaggcggagaacaagcacaagccccgcaggaagtcaaagcggggcaagaaggaggcggaggacgagctgagcgccaggcacccggcggagctggcgatggagcccacccctgagctcccggctgaggtgctcatggtggaggtagagaacgttgtccacgaggacttccaggtcacggaggaggtgaaagccctgactgcagagatcgtgaagaccatccgggacatcattgccttgaaccctctctacagggagtcagtgctgcagatgatgcaggctggccagcgggtggtggacaaccccatctacctgagcgacatgggcgccgcgctcaccggggccgagtcccatgagctgcaggacgtcctggaagagaccaatattcctaagcggctgtacaaggccctctccctgctgaagaaggaatttgaactgagcaagctgcagcagcgcctggggcgggaggtggaggagaagatcaagcagacccaccgtaagtacctgctgcaggagcagctaaagatcatcaagaaggagctgggcctggagaaggacgacaaggatgccatcgaggagaagttccgggagcgcctgaaggagctcgtggtccccaagcacgtcatggatgttgtggacgaggagctgagcaagctgggcctgctggacaaccactcctcggagttcaatgtcacccgcaactacctagactggctcacgtccatcccttggggcaagtacagcaacgagaacctggacctggcgcgggcacaggcagtgctggaggaagaccactacggcatggaggacgtcaagaaacgcatcctggagttcattgccgttagccagctccgcggctccacccagggcaagatcctctgcttctatggcccccctggcgtgggtaagaccagcattgctcgctccatcgcccgcgccctgaaccgagagtacttccgcttcagcgtcgggggcatgactgacgtggctgagatcaagggccacaggcggacctacgtgggcgccatgcccgggaagatcatccagtgtttgaagaagaccaagacggagaaccccctgatcctcatcgacgaggtggacaagatcggccgaggctaccagggggacccgtcgtcggcactgctggagctgctggacccagagcagaatgccaacttcctggaccactacctggacgtgcccgtggacttgtccaaggtgctgttcatctgcacggccaacgtcacggacaccatccccgagccgctgcgagaccgtatggagatgatcaacgtgtcgggctacgtggcccaggagaagctggccattgcggagcgctacctggtgccccaggctcgcgccctgtgtggcttggatgagagcaaggccaagctgtcatcggacgtgctgacgctgctcatcaagcagtactgccgcgagagcggtgtccgcaacctgcagaagcaagtggagaaggtgttacggaaatcggcctacaagattgtcagcggcgaggccgagtccgtggaggtgacgcccgagaacctgcaggacttcgtggggaagcccgtgttcaccgtggagcgcatgtatgacgtgacaccgcccggcgtggtcatggggctggcctggaccgcaatgggaggctccacgctgtttgtggagacatccctgagacggccacaggacaaggatgccaagggtgacaaggatggcagcctggaggtgacaggccagctgggggaggtgatgaaggagagcgcccgcatagcctacaccttcgccagagccttcctcatgcagcacgcccccgccaatgactacctggtgacctcacacatccacctgcatgtgcccgagggcgccacccccaaggacggcccaagcgcaggctgcaccatcgtcacggccctgctgtccctggccatgggcaggcctgtccggcagaatctggccatgactggcgaagtctccctcacgggcaagatcctgcctgttggtggcatcaaggagaagaccattgcggccaagcgcgcaggggtgacgtgcatcgtcctgccagccgagaacaagaaggacttctacgacctggcagccttcatcaccgagggcctggaggtgcacttcgtggaacactaccgggagatcttcgacatcgccttcccggacgagcaggcagaggcgctggccgtggaacggtgacggccaccccgggactgcaggcggcggatgtcaggccctgtctgggccagaactgagcgctgtggggagcgcgcccggacctggcagtggagccaccgagcgagcagctcggtccagtgacccagatcccagggacctcagtcggcttaatcagagtgtggcatagaagctatttaatgattaaagtcatttgcagta

SEQ ID NO: 432 - DNA, 1509 bp, Homo sapiens
atggcggcgccctgtgagggacaagcgtttgccgtaggggttgaaaagaattggggtgcagtagttcgctccccagaagggaccccccagaaaatccggcagctgatagatgaggggattgccccggaagagggaggcgtggacgcgaaggacacgtctgccacatcccagtcagttaatggatcaccccaagcggaacaaccttcattggaatctacaagcaaagaagccttctttagcagagtggaaacattttcttctttgaaatgggcaggtaagccctttgagctgtctccactcgtctgtgcaaaatatggctgggtcacagtggaatgtgatatgctcaagtgctctagctgtcaagcttttctctgtgccagtttacaaccagcttttgactttgacagatataagcaacgatgtgctgagctgaagaaagccttgtgtactgcccatgagaagttctgtttctggccagacagcccatccccagaccgatttgggatgttgcccctggatgagcctgctattcttgttagtgaattcctagatcgttttcaaagcctttgtcacttggacctccagcttccttccctaaggccggaggacttgaaaactatgtgcttgacagaagacaagatcagtcttctcctacacttgcttgaagatgaacttgatcaccgaactgatgagagaaaaactacaatcaaattaggctcagacatccaagtccacgtcactgcctgtattctctctgtgtgtggctgggcgtgtagttcctctttggaatccatgcagctctccctgataacatgttcgcaatgtatgaggaaggtggggctctggggcttccagcagattgaatcgtccatgactgacctggatgcatcctttggcctgaccagctccccaatcccaggccttgaggggcgaccagagcgcttacctctggtgcctgaatctcctcggaggatgatgacccggagccaggatgccactttctccccaggctcagagcaggctgaaaagagccctggtcccattgtctctcgaactcggagctgggactcttccagtcctgttgaccgtcctgagccagaggctgctagccccaccaccagaactcgcccagtgacccgaagcatgggaacaggagacacccctggcctggaggtaccatctagccctctgcggaaagccaagcgagctcgcctctgctcctccagcagttcggacacatcttcccgaagcttctttgatcccacctctcagcatagagactggtgcccttgggtgaatatcacacttggcaaagaaagcagggagaatggtggaactgaaccagatgccagcgccccagcagagccaggctggaaagcagtgctgaccatcctcttggcgcacaaacagtctagccagccagctgaaacggactccatgagtctctctgagaaatcaaggaaagtattccgaatatttcggcagtgggaatctctgtgctcatgctga

SEQ ID NO: 433 - DNA, 534 bp, Homo sapiens
atggaggcgctgattttggaaccttccctgtatactgtcaaagccatcctgattctggacaatgatggagatcgactttttgccaagtactatgacgacacctaccccagtgtcaaggagcaaaaggcctttgagaagaacattttcaacaagacccatcggactgacagtgaaattgccctcttggaaggcctgacagtggtatacaaaagcagtatagatctctatttctatgtgattggcagctcctatgaaaatgagctgatgcttatggctgttctgaactgtctcttcgactcattgagccagatgctgaggaaaaatgtagaaaagcgagcactgctggagaacatggaggggctgttcttggctgtggatgaaattgtagatggaggggtgatcctagagagtgatccccagcaggtggtacaccgggtggcattaaggggtgaagatgtcccccttacggagcagaccgtgtctcaggtgctgcagtcagccaaagaacagatcaagtggtcactccttcggtga

SEQ ID NO: 434 - DNA, 2214 bp, Homo sapiens
atggggggatgcacggtgaagcctcagctgctgctcctggcgctcgtcctccacccctggaatccctgtctgggtgcggactcggagaagccctcgagcatccccacagataaattattagtcataactgtagcaacaaaagaaagtgatggattccatcgatttatgcagtcagccaaatatttcaattatactgtgaaggtccttggtcaaggagaagaatggagaggtggtgatggaattaatagtattggagggggccagaaagtgagattaatgaaagaagtcatggaacactatgctgatcaagatgatctggttgtcatgtttactgaatgctttgatgtcatatttgctggtggtccagaagaagttctaaaaaaattccaaaaggcaaaccacaaagtggtctttgcagcagatggaattttgtggccagataaaagactagcagacaagtatcctgttgtgcacattgggaaacgctatctgaattcaggaggatttattggctatgctccatatgtcaaccgtatagttcaacaatggaatctccaggataatgatgatgatcagctcttttacactaaagtttacattgatccactgaaaagggaagctattaacatcacattggatcacaaatgcaaaattttccagaccttaaatggagctgtagatgaagttgttttaaaatttgaaaatggcaaagccagagctaagaatacattttatgaaacattaccagtggcaattaatggaaatggacccaccaagattctcctgaattattttggaaactatgtacccaattcatggacacaggataatggctgcactctttgtgaattcgatacagtcgacttgtctgcagtagatgtccatccaaacgtatcaataggtgtttttattgagcaaccaaccccttttctacctcggtttctggacatattgttgacactggattacccaaaagaagcacttaaactttttattcataacaaagaagtttatcatgaaaaggacatcaaggtattttttgataaagctaagcatgaaatcaaaactataaaaatagtaggaccagaagaaaatctaagtcaagcggaagccagaaacatgggaatggacttttgccgtcaggatgaaaagtgtgattattactttagtgtggatgcagatgttgttttgacaaatccaaggactttaaaaattttgattgaacaaaacagaaagatcattgctcctcttgtaactcgtcatggaaagctgtggtccaatttctggggagcattgagtcctgatggatactatgcacgatctgaagattatgtggatattgttcaagggaatagagtaggagtatggaatgtcccatatatggctaatgtgtacttaattaaaggaaagacactccgatcagagatgaatgaaaggaactattttgttcgtgataaactggatcctgatatggctctttgccgaaatgctagagaaatgggtgtatttatgtacatttctaatagacatgaatttggaaggctattatccactgctaattacaatacttcccattataacaatgacctctggcagatttttgaaaatcctgtggactggaaggaaaagtatataaaccgtgattattcaaagattttcactgaaaatatagttgaacagccctgtccagatgtcttttggttccccatattttctgaaaaagcctgtgatgaattggtagaagaaatggaacattacggcaaatggtctgggggaaaacatcatgatagccgtatatctggtggttatgaaaatgtcccaactgatgatatccacatgaagcaagttgatctggagaatgtatggcttcattttatccgggagttcattgcaccagttacactgaaggtctttgcaggctattatacgaagggatttgcactactgaattttgtagtaaaatactcccctgaacgacagcgttctcttcgtcctcatcatgatgcttctacatttaccataaacattgcacttaataacgtgggagaagactttcagggaggtggttgcaaatttctaaggtacaattgctctattgagtcaccacgaaaaggctggagcttcatgcatcctgggagactcacacatttgcatgaaggacttcctgttaaaaatggaacaagatacattgcagtgtcatttatagatccctaa

SEQ ID NO: 435 - DNA, 1193 bp, Homo sapiens
acgatgtcgcattgacaaccgacgttggagtttggaggtgcttgccttagagcaagggaaacagctctcattcaaaggaactagaagcctctccctcagtggtagggagacagccaggagcggttttctgggaactgtgggatgtgcccttgggggcccgagaaaacagaaggaagatgctccagaccagtaactacagcctggtgctctctctgcagttcctgctgctgtcctatgacctctttgtcaattccttctcagaactgctccaaaagactcctgtcatccagcttgtgctcttcatcatccaggatattgcagtcctcttcaacatcatcatcattttcctcatgttcttcaacaccttcgtcttccaggctggcctggtcaacctcctattccataagttcaaagggaccatcatcctgacagctgtgtactttgccctcagcatctcccttcatgtctgggtcatgaacttacgctggaaaaactccaacagcttcatatggacagatggacttcaaatgctgtttgtattccagagactagcagcagtgttgtactgctacttctataaacggacagccgtaagactaggcgatcctcacttctaccaggactctttgtggctgcgcaaggagttcatgcaagttcgaaggtgacctcttgtcacactgatggatacttttccttcctgatagaagccacatttgctgctttgcagggagagttggccctatgcatgggcaaacagctggactttccaaggaaggttcagactagctgtgttcagcattcaagaaggaagatcctccctcttgcacaattagagtgtccccatcggtctccagtgcggcatcccttccttgccttctacctctgttccaccccctttccttcctttcctctctgtaccattcattctccctgaccggcctttcttgccgagggttctgtggctcttacccttgtgaagcttttcctttagcctgggacagaaggacctcccagcccccaaaggatctcccagtgaccaaaggatgcgaagagtgatagttacgtgctcctgactgatcacaccgcagacatttagatttttatacccaaggcactttaaaaaaatgttttataaatagagaataaattgaattcttgttcctaaaaaaaaaaaaaaaaaaaaaaaaaaaaaa

SEQ ID NO: 436 - DNA, 2685 bp, Homo sapiens
atgcgtccaatgcgaatttttgtgaatgatgaccgccatgtgatggcaaagcattcttccgtttatccaacacaagaggagctggaggcagtccagaacatggtgtcccacacggagcgggcgctcaaagctgtgtccgactggatagacgagcaggaaaagggtagcagcgagcaggcagagtccgataacatggatgtgcccccagaggacgacagtaaagaaggggctggggaacagaagacggagcacatgaccagaaccctgcggggagtgatgcgggtgggcctggtggcaaagggcctcctactcaagggggacttggatctggagctggtgctgctgtgtaaggagaagcccacaaccgccctcctggacaaggtggccgacaacctggccatccagcttgctgctgtaacagaagacaagtacgaaatactgcaatctgtcgacgatgctgcgattgtgataaaaaacacaaaagagcctccattgtccctgaccatccacctgacatcccctgttgtcagagaagaaatggagaaagtattagctggagaaacgctatcagtcaacgaccccccggacgttctggacaggcagaaatgccttgctgccttggcgtccctccgacacgccaagtggttccaggccagagccaacgggctgaagtcttgtgtcattgtgatccgggtcttgagggacctgtgcactcgcgtgcccacctggggtcccctccgaggctggcctctcgagctcctgtgtgagaaatccattggcacggccaacagaccgatgggtgctggcgaggccctgcggagagtgctggagtgcctggcgtcgggcatcgtgatgccagatggttctggcatttatgacccttgtgaaaaagaagccactgatgctattgggcatctagacagacagcaacgggaagatatcacacagagtgcgcagcacgcactgcggctcgctgccttcggccagctccataaagtcctaggcatggaccctctgccttccaagatgcccaagaaaccaaagaatgaaaacccagtggactacaccgttcagatcccaccaagcaccacctatgccattacgcccatgaaacgcccaatggaggaggacggggaggagaagtcgcccagcaaaaagaagaagaagattcagaagaaagaggagaaggcagagcccccccaggctatgaatgccctgatgcggttgaaccagctgaagccagggctgcagtacaagctggtgtcccagactgggcccgtccatgcccccatctttaccatgtctgtggaggttgatggcaattcattcgaggcctctgggccctccaaaaagacggccaagctgcacgtggccgttaaggtgttacaggacatgggcttgccgacgggtgctgaaggcagggactcgagcaagggggaggactcggctgaggagaccgaggcgaagccagcagtggtggcccctgccccagtggtagaagctgtctccacccctagtgcggcctttccctcagatgccactgccgagcaggggccgatcctgacaaagcacggcaagaacccagtcatggagctgaacgagaagaggcgtgggctcaagtacgagctcatctccgagaccgggggcagccacgacaagcgcttcgtcatggaggtcgaagtggatggacagaagttccaaggtgctggttccaacaaaaaggtggcgaaggcctacgctgctcttgctgccctagaaaagcttttccctgacacccctctcgcccttgatgccaacaaaaagaagagagccccagtacccgtcagagggggaccgaaatttgctgctaagccacataaccctggcttcggcatgggaggccccatgcacaacgaagtgcccccaccccccaaccttcgagggcggggaagaggcgggagcatccggggacgagggcgcgggcgaggatttggtggcgccaaccatggaggctacatgaatgccggtgctgggtatggaagctatgggtacggaggcaactcggcgacagcaggctacagtcagttctacagcaacggagggcattctgggaatgccagtggcggtggcggcgggggcggtggtggctcctccggctatggctcctactaccaaggtgacaactacaactcaccggtgcccccaaaacacgctgggaagaagcagccgcacgggggccagcagaagccctcctacggctcgggctaccagtcccaccagggccagcagcagtcctacaaccagagcccctacagcaactatggccctccacagggcaagcagaaaggctataaccatggacaaggcagctactcctactcgaactcctacaactctcccgggggcgggggcggatccgactacaactacgagagcaaattcaactacagtggtagtggaggccgaagcggcgggaacagctacggctcaggcggggcatcctacaacccagggtcacacgggggctacggcggaggttctgggggcggctcctcataccaaggcaaacaaggaggctactcacagtcgaactacaactccccggggtccggccagaactacagtggccctcccagctcctaccagtcctcacaaggcggctatggcagaaacgcagaccacagcatgaactaccagtacagataa

SEQ ID NO: 437 - DNA, 543 bp, Homo sapiens; identical to SEQ ID NO: 147

SEQ ID NO: 438 - DNA, 751 bp, Homo sapiens
gcggccggggagctgcgtagctcccggccccgcggccatgcccaagcggagctgccccttcgcggacgtggccccgctacagctcaaggtccgcgtgagccagagggagttgagccgcggcgtgtgcgccgagcgctactcgcaggaggtcttcgagaagaccaagcgactcctgttcctcggggcccaggcctacctggaccacgtgtgggatgaaggctgtgccgtcgttcacctgccagagtccccaaagcctggccctacaggggccccgagggctgcacgtgggcagatgctgattggaccagacggccgcctgatcaggagccttgggcaggcctccgaagctgacccatctggggtagcgtccattgcctgttcctcatgcgtgcgagccgtggatgggaaggcggtctgcggtcagtgtgagcgagccctgtgcgggcagtgtgtgcgcacctgctggggctgcggctccgtggcctgtaccctgtgtggcctcgtggactgcagtgacatgtacgagaaagtgctgtgcaccagctgtgccatgttcgagacctgaggctggctcaagccggctgccttcaccgggagccacgccgtgcatggcagccttccctggacgagcgctcggtgttcacactgaactgtggggtcgacgggaggggtgccttttacatgttctattttgtatcctaatgacagaatgaataaacctctttatatttgcaaaaaaaaaaaaaaaaaa

SEQ ID NO: 439 - DNA, 1182 bp, Homo sapiens
atgacgacttacagtgacaaaggggcaaagcctgagagaggccgattcctccacttccactctgtgaccttctgggttggcaacgccaagcaggccacgtcattctactgcagcaagatgggctttgaacctctagcctacaggggcctggagaccggttcccgggaggtggtcagccatgtaatcaaacaagggaagattgtgtttgtcctctcctcagcgctcaacccctggaacaaagagatgggcgatcacctggtgaaacacggtgacggagtgaaggacattgcgttcgaggtggaagattgtgactacatcgtgcagaaagcacgggaacggggcgccaaaatcatgcgggagccctgggtagagcaagacaagtttgggaaggtgaagtttgctgtgctgcagacgtatggggacaccacacacaccctggtggagaagatgaactacatcggccaattcttgcctggatatgaggccccagcgttcatggaccccctacttcctaaactgcccaaatgcagtctggagatgatcgaccacattgtgggaaaccagcctgatcaggagatggtgtccgcctccgaatggtacctgaaaaacctgcagttccaccgcttctggtccgtggatgacacgcaggtgcacacggaatatagctctctgcgatccattgtggtggccaactatgaagagtccatcaagatgcccatcaatgagccagcgcctggcaagaagaagtcccagatccaggaatatgtggactataacgggggcgctggggtccagcacatcgctctcaagaccgaagacatcatcacagcgattcgccacttgagagagagaggcctggagttcttatctgttccctccacgtactacaaacaactgcgggagaagctgaagacggccaagatcaaggtgaaggagaacattgatgccctggaggagctgaaaatcctggtggactacgacgagaaaggctacctcctgcagatcttcaccaaaccggtgcaggaccggcccacgctcttcctggaagtcatccagcgccacaaccaccagggttttggagccggcaacttcaactcactgttcaaggctttcgaggaggagcagaacctgcggggtaacctcaccaacatggagaccaatggggtggtgcccggcatgtaa

SEQ ID NO: 440 - DNA, 2070 bp, Homo sapiens
atggcggcgcgcaccctgggccgcggcgtcgggaggctgctgggcagcctgcgagggctctcggggcagcccgcgcggccgccgtgcggggtgagcgcgccgcgcagggcggcctcgggaccctcgggcagcgctcccgcagttgcagcagcagcagcacagccaggctcgtatcccgcgctgagtgcacaggcagcccgggagccggccgccttctgggggcctctggcgcgggacactctcgtgtgggacaccccctaccacaccgtctgggactgcgacttcagcactggcaagatcggctggttcctgggaggccagttaaatgtctctgtcaactgcttggaccagcatgttcggaagtcccccgagagcgttgctttgatctgggagcgcgatgagcctggaacggaagtgaggatcacctacagggaactactggagaccacgtgccgcctggccaacacgctgaagaggcatggagtccaccgtggggaccgtgttgccatctacatgcccgtgtccccattggctgtggcagcaatgctggcctgtgccaggatcggagctgtccacacagtcatctttgctggcttcagtgcagagtccttggctgggaggatcaatgatgccaagtgcaaggtggttatcaccttcaaccaaggactccggggtgggcgcgtggtggagctgaagaaaatagtggatgaggctgtgaagcactgccccaccgtgcagcatgtcctggtggctcacaggacagacaacaaggtccacatgggggatctggacgtcccgctggagcaggaaatggccaaggaggaccctgtttgcgccccagagagcatgggcagtgaggacatgctcttcatgctgtacacctcagggagcaccggaatgcccaagggcatcgtccatacccaggcaggctacctgctctatgccgccctgactcacaagcttgtgtttgaccaccagccaggtgacatctttggctgtgtggccgacatcggttggattacaggacacagctacgtggtgtatgggcctctctgcaatggtgccaccagcgtcctttttgagagcaccccagtttatcccaatgctggtcggtactgggagacagtagagaggttgaagatcaatcagttctatggcgccccaacggctgtccggctgttgctgaaatacggtgatgcctgggtgaagaagtatgatcgctcctccctgcggaccctggggtcagtgggagagcccatcaactgtgaggcctgggagtggcttcacagggtggtgggggacagcaggtgcacgctggtggacacctggtggcagacagaaacaggtggcatctgcatcgcaccacggccctcggaagaaggggcggaaatcctccctgccatggcgatgaggcccttctttggcatcgtccccgtcctcatggatgagaagggcagcgtcgtggagggcagcaacgtctccggggccctgtgcatctcccaggcctggccgggcatggccaggaccatctatggcgaccaccagcgatttgtggacgcctacttcaaggcctacccaggctattacttcactggagacggggcttaccgaactgagggcggctattaccagatcacagggcggatggatgatgtcatcaacatcagtggccaccggctggggaccgcagagattgaggacgccatcgccgaccaccctgcagtaccagaaagtgctgtcattggctacccccacgacatcaaaggagaagctgcctttgccttcattgtggtgaaagatagtgcgggtgactcagatgtggtggtgcaggagctcaagtccatggtggccaccaagatcgccaaatatgctgtgcctgatgagatcctggtggtgaaacgtcttccaaaaaccaggtctgggaaggtcatgcggcggctcctgaggaagatcatcactagtgaggcccaggagctgggagacactaccaccttggaggaccccagcatcatcgcagagatcctgagtgtctaccagaagtgcaaggacaagcaggctgctgctaagtga

SEQ ID NO: 441 - DNA, 2178 bp, Homo sapiens
atgtggggatttttgaagcgccctgtagtggtgacggctgacatcaacttgagccttgtggccctgactgggatggggttactgagccggctgtggcgactcacctacccgcgggctgtggtttttgacgaagtatattatgggcagtacatctctttttacatgaaacaaatcttcttcttggatgacagtgggccgccatttggccacatggtgctggccttgggaggttatttaggaggattcgatggcaattttttgtggaacagaattggagcagaatacagtagcaacgtgcctgtgtggtccctgcgcctgctgccagcactcgcgggggccttgtcggtccccatggcctaccagatagtgttggagctccacttttctcattgtgccgccatgggagctgctctgttgatgcttatcgagaatgctctcatcactcagtcaaggctaatgcttttggaatcagtgttaatatttttcaatctattggccgtgttgtcctacctgaagttcttcaactgccaaaagcacagccctttttctctgagctggtggttctggctaacactgacaggggtcgcttgttcctgtgcagtgggcatcaagtacatgggtgtgttcacgtacgtgctcgtgctgggtgttgcagctgtccatgcctggcacctgcttggagaccagactttgtccaatgtctgtgtgttctgtcacttgctcgcccgagcagtggctttgctggtcatcccggtcgtcctgtacttactgttcttctacgtccacttgattctagtcttccgctctgggccccacgaccaaatcatgtccagtgccttccaggccagcttagagggaggactagctcggatcactcagggtcagccactggaggtggcctttgggtcccaggtcactctgaggaacgtctttgggaaacctgtgccctgctggcttcattcccaccaggacacctaccccatgatatatgagaacggccgaggcagctcccaccagcaacaggtgacctgttaccccttcaaagatgtcaataactggtggattgtaaaggatcccaggaggcaccagctggtggtgagcagccctccgagacctgtgaggcacggggacatggtgcagctggtccacggcatgaccacccgctccctgaacacgcatgatgttgcagcccccctgagcccccattcacaggaggtctcctgctacattgactataacatctccatgcccgcccagaacctctggagactggaaattgtgaacagaggatctgacacagacgtctggaagaccatcctctcagaggtccgctttgtgcacgtgaacacttccgctgtcttaaagctgagcggggctcacctccctgactgggggtatcggcaactggagatcgtcggggagaagctgtcccggggctaccacgggagcacggtgtggaacgtggaggagcaccgatacggcgcgagccaggagcagagggagcgggaacgggagctgcactcacctgcgcaggtggacgtcagcaggaacctcagcttcatggcgagattctcggagctgcagtggaggatgctggcgctgagaagtgatgactcggaacacaagtacagctccagcccactggagtgggtcaccctggacaccaatattgcctactggctgcaccccaggaccagcgctcagatccacctacttggaaacatagtgatctgggtttcgggcagcctcgctctggccatctacgccctgctgtccttgtggtacctgctccgacggcgaagaaatgtccatgacctccctcaggatgcctggctgcgctgggtgctggctggggcgctgtgtgccggtggctgggcagtgaactacctcccgttcttcctgatggagaagacactcttcctctaccactacctgcccgcactcaccttccaaatccttctgctccctgtggtcctgcagcacatcagcgaccacctgtgcaggtcccagctccagaggagcatcttcagcgccctggtggtggcctggtactcctccgcgtgccacgtgtccaacacgctgcgcccactcacctacggggacaagtcactctcgccacatgaactcaaggcccttcgctggaaagacagctgggacatcttgatccgaaaacactag

SEQ ID NO: 442 - DNA, 451 bp, Homo sapiens
tacttcttatcaatttttatttgggaaaaatttttatacctccttaagaatctaaaaggcattaggagatgagaagaattaggctgagtctctccatctgtatttgctgaaggtctctgtacccattttctgatagagacaaaaaaaaataacccacaaaaggacaaaagcgaggatgagtgcctgcaggagcgcaaaaggacaaatggccaatcaactcacacaaaatacaaatctgaccccacatcaaactttgctgataattagcaaagagtgccaaaaaggagctaccacacatatcacatcaatatttaggaggtcctaaatgtgcacttccacactgggatgagatctggttttgttcaactagcatagggtataagctaacatggaaaccttactcagtttcggaccctctaagtctttatacctcattaactaacttctgcct

SEQ ID NO: 443 - DNA, 1309 bp, Homo sapiens
gcagagcgcacgcgcttggctgcctggcgactgcacaagcagggatggcgtcgcttcagcgttctcgggtgctacgctgctgcagctgccgcctcttccaggcgcaccaggtaaaaaagagtgtcaagtggacatgcaaagcttgtggagagaagcagtcctttttgcagagttccccagacacggagctcctgcttccgagcttcctgttccttcaggaagtgaaatggatggagcagaatctggaaaggcttatggtgaaggctctggtgctgattgtagacgccatgtccaaaagttaaatctactacagggacaagtttcagagctgccactcaggtctctagaagaaactgtcagtgccagtgaagaagaaaacgtgggacaccagcaggctgggaatgtgaagcagcaggaaaaatcgcagccctcagagagtcgctggctgaagtatctagaaaaggactcccaagaactggagctggaaggaacaggagtgtgtttcagcaaacagccttcatccaaaatggaggagccaggcccccgcttcagtcaagacctgcctagaaaaaggaagtggagcaggagcaccgtccagcctccgtgcagccgtggcgtgcaggactcgggtggctctgaggtcgcctggggaccccagaagggacaggctggcctgacatggaaggtgaaacaaggcagcagcccctgcctccaggagaactctgcagactgcagtgccggggagctgaggggtcctgggaaggagctatggagtcccatccagcaggttacagccacatcctctaaatgggcgcaatttgtcctgccacctagaaaaagttcacatgtggacagtgagcagccaaggtctcttcagagggaccccaggccagctggtccagcacaggctaagcaagggacccccagagcacaggcctcaagagaaggcctcagcaggcccactgccgctgtccagcttcctcgggccacacaccccgtcacatctgggtctgagaggccttgcgggaagacctcatgggacgcaaggactccctgggcagagggtgggcccctggtcctggaggcacagaatcctcgacccacacgactatgtgacctctttataactggggaagacttcgatgatgatgtgtgatctgggactggcaggttattaatcgagatacacttgttaggagggacagggttcccctaaggcacttttaaagatactctgtaagaaccattaacaataaacttactgtcaatcatttctctctaaaaaaaaaaaaaaaaaaaaaaaaaaaaa

SEQ ID NO: 444 - DNA, 1422 bp, Homo sapiens
atggaaaccccaacacctttgccgcctgtacccgcctccccgacctgcaacccagccccacggacaatccagatcgagttcccacagcatagctcgtctctgctggaatctctgaaccgccacaggctagagggaaagttctgtgatgtgtccctcctggtgcagggccgggaacttagggctcataaagcagtgttagctgctgcctctccttacttccatgacaagctgcttctgggggatgcgcctcgtctcactctaccgagtgtcattgaagccgatgccttcgaggggctgctccagctcatttattcagggcgtctccgcctgccactggatgctcttcctgctcatctccttgtggccagtggccttcaaatgtggcaggtagtagatcagtgctcagaaattcttagagaattagaaacttcaggtggtggaatttcagcccgtggaggaaactcctaccatgcccttctttccactacatcctctacaggaggctggtgcattcgctcttcgcctttccagaccccagtacagtcctctgcttctactgaaagccctgcttccactgagagccctgtgggaggggagggaagtgaactgggagaagtgctgcaaattcaggtggaagaagaagaggaggaggaggaagatgatgatgatgaggaccaggggtcagccacactctctcagactcctcagccccagagagtatcaggggtttttccccgtcctcatggaccccacccactgcccatgactgctactccccgaaagcttccagagggtgagagtgcaccacttgagcttcctgcccctcctgcactgccccccaaaatcttctacattaagcaggaacccttcgagcctaaggaggagatatcaggaagcggaactcagcctggaggagcaaaggaggaaaccaaagtgttttctggaggggacactgaagggaatggggagctagggttcttgttgccttcagggccagggccaacatctgggggagggggtccatcctggaaaccagtggatcttcatgggaatgaaatcctgtcagggggtggaggacctgggggagcaggccaggccgtgcatgggcctgtgaagctaggggggacaccccctgcagatggaaaacgctttggttgcctgtgtgggaagcggtttgcagtgaagccaaagcgtgaccggcacatcatgctgaccttcagccttcggccttttggctgtggcatctgcaacaagcgcttcaagctgaagcaccatctgacagagcacatgaagacccatgctggagccctgcatgcctgtccccactgtggccgtcggttccgagtccatgcctgttttctccgccaccgggacctatgcaagggccagggctgggccactgcccactggacttacaagtga

SEQ ID NO: 445 - DNA, 1862 bp, Homo sapiens
aaaaaaaaaaaaacagtgggttggaataatcttataatctccctcagcattcatctaaagttcctgctttaaaggcactactcattagaaggaagagctgaaggagaagacggactcctctccatcatgggaaaggaaggaggctaagtgacttccaggaacagctgctaacttccctgatttcacagccctcattttcatgctcatcttttccctaccaccgtctggctcctcagagtgtgtgagctccctagtaggtgcagtagtaatagtaggcaccctttgctgttattgttatgaaaactgtcagctccaggatggtgctggaggtgacgatgatgttgatgacagggttgttaggaatggagttagtggcaagtggagctacagatgggcccacgggtatgagagctactaacaggaactttgactcaatttggcaaaatcgtatttcaaatctaaattctctttccaccagctccttttgctataagggaaagccaagtggaaacgtagaggcatgtgcacccagatctcctgaaaagggcaataggagagggtagcagggaggagacaatcctctactgagctgaactggaaacgcctgattgtcatttcttccctgctttgccactgacgcccgcagcagctgatcaggaaggtatcagatgccttcactagctgtcactaacacctgcctcctgaatcctgatcggggagatggtgtcatcgggccctccacataaaatatttagtggcacttgcttcccaaagaggcaagcgtggcctctccttggcatcaggaacgctccgagttacatgtgctgggagactctcttgttcaggcgagagtcctggagcagcatacctggtttgagacttggagtaggagagagggaaactggtagaacagagactaggcaagttttggctcttgagaatgcatgtgacaagtgacttcatgcactaaacagagagggatgtgacagaaagaagaaagcatcattattaagagaaaactcctgaggttgacactagcagaaaattggggataggaggaagtcacactgggtatgcaaagtcaaatgcatgtttgtttaccagtgtctaccaaactgaggatgggaaattcattctaagacagatgatgggatggatggaggtgaggagctggaaataatgacaaataaattgctaataacaaaggctaatgtatcttaaacacttaagatggccatgaactgttctaagtgcttttatatgtattaactgatttcattgtaataatcctatgacgtagctactagtactaaacctattttatatagatagttagataacatcatagaatggctaagtaccttgaccaagtgtacacagctataggctccatttgcgtccaggcacctaagttcagagctcatgcatttaattgttatatcgcactgcctctcaccagaggcacaaaggtgggctccatcctcccttactcagaatgtggataggagtcctgattttgcccactgggctctgcttggaacagccacttagtcacatcaatttggcatagaaagatgaaggctctcaacgtgcccttgaagtcagctgtcttcatgaaggccacactcccaaggtggggtgcaaacctcccctcactgcaggagactgtgcctcctcttgactccagtgtccaatgacagctgctcccaggcgggcagtccctgagtcctgtgagatgaattcacttggctggttatcaggagtggcctgtcccaaagcaaatgctgcatgagggtgagaggaaaacagcccagctggagtggtctgtttagaactactggcctgaaaaaaaaaaaaaaaaa

SEQ ID NO: 446 - DNA, 1209 bp, Homo sapiens
atgggactgggccaagggtggggctgggaagcatcctgttttgcatgtttgatcaggagctgctgccaagttgtgactttcactttcccttttgggttccagggtatatctcagagcctggagaacgtgtctggttattatgcagatgcacggctggaggtgggatccacacagctcagaacagctggatcttgctcacactctttcaagagaagcttccttgaaaagaaacgctttactgaagaggccaccaaatacttccgggagagagtcagcccagtgcatctgcaaatcctgctgactaacaatgaagcctggaagagattcgtgactgcggctgaattgcccagggatgaggcagatgctctctacgaagctctgaagaagcttagaacatatgcagctattgaggacgaatatgtgcagcagaaagatgagcagtttagggaatggtttttgaaagagtttccccaagtcaagaggaagatccaggagtccatagaaaagcttcgtgcccttgcaaatggtattgaagaggtccacagaggctgcaccatctccaatgtggtgtccagctccactggcgctgcctctggcatcatgtcccttgctggtcttgttttggcaccatttacagcagggacgagtctggcccttactgcagctggggtagggctgggagcagcgtctgctgtgactgggatcaccaccagcatcgtggagcactcatacacatcatcagcagaagctgaagccagcaggctgactgcaaccagcattgaccgattgaaggtatttaaggaagttatgcgtgacatcacacccaacttactttcccttcttaataattattacgaagccacacaaaccattgggagtgaaatccgtgccatcaggcaagccagagccagggcccgactccctgtgaccacctggcgaatctcagctggaagtggtggtcaagcagagagaacgattgcaggcaccacccgggcagtgagcagaggagcccggatcctgagtgcgaccacttcaggcatcttccttgcactggatgtggtcaaccttgtatacgagtcaaagcacttgcatgagggggcaaagtctgcatctgctgaggagctgaggcggcaggctcaggagctggaggagaatctaatggagctcactcagatctatcagcgtctgaatccatgccatacccactga

SEQ ID NO: 447 - DNA, 1515 bp, Homo sapiens
atggtggcccccggctccgtgaccagccggctgggctcggtattccccttcctgctagtcctggtggatctgcagtacgaaggtgctgaatgtggagtaaatgcagatgttgagaaacatcttgaattgggcaagaaattacttgcagctggacagctagctgatgctttatctcagtttcatgctgccgtagatggtgaccctgataactatattgcttattatcggagggctactgtctttttagctatgggcaaatcaaaagctgcacttcctgatttaactaaagtgattcaattgaagatggacttcactgcagcaagattacagagaggtcacttattactcaaacaaggaaaacttgatgaagcagaagatgattttaaaaaagtgctcaaatctaatccaagtgaaaatgaagaaaaggaagcacagtctcaacttataaaatctgatgaaatgcagcgtttgcgttcacaagcacttaacgcttttggaagtggagattatactgctgctatagccttccttgataagattttagaggtttgtgtttgggatgcagaactacgggaacttcgagctgaatgttttataaaagaaggagaacctaggaaagctataagtgacttaaaagctgcgtcaaagttgaagaatgataatactgaagcgttttataaaataagcacactgtactaccaactaggagaccacgaactgtccctcagtgaagttcgggaatgtcttaaacttgaccaggatcataaaaggtgttttgcacactataaacaagtaaagaaacttaataagctgattgagtcagctgaagagctcatcagagatggcagatacacagatgctaccagcaaatatgaatctgtcatgaaaacagagccaagcattgctgaatatacagttcgttcaaaggagaggatttgccactgcttttctaaggacgagaagcctgttgaagctattagggtttgttctgaagttttacagatggaacctgacaatgtgaatgccctgaaagatcgagcagaggcctatttgatagaggaaatgtatgatgaagctattcaggattatgaaactgctcaggaacacaatgaaaatgatcagcagattcgagaaggtctagagaaagcacaaagattattgaaacagtcgcagaaacgagattattataaaatcttgggagtaaaaagaaatgccaaaaagcaagaaattattaaagcataccgaaaattagcactgcagtggcacccagataacttccagaatgaagaagaaaagaaaaaagctgagaaaaagttcattgatatagcagctgctaaagaagtcctctctgatccagaaatgagaaagaagtttgacgacggagaagatcctttggatgcagagagccagcaaggaggcggcggcaaccctttccacagaagctggaactcatggcaagggttcaatcccttcagctcaggcggaccatttagatttaaattccacttcaattaa

SEQ ID NO: 448 - DNA, 891 bp, Homo sapiens
atggcgcgctgcgagaggctgcgcggagcggccctgcgcgacgtgctgggccgggcgcagggggtcctgttcgactgtgacggggtgctgtggaacggcgagcgcgccgtgccgggcgccccggagctgctggagcggctggcgcgggccggcaaggcggctctgtttgtgagcaacaacagccggcgcgcgcggcccgagctggccctgcgcttcgcgcgcctcggcttcggggggctgcgcgccgagcagctcttcagctccgcgctgtgcgccgcgcgcctgctgcgccagcgcctgcccgggcctccggacgcgccgggcgccgtgttcgtgctgggcggcgaggggctgcgcgccgagctgcgcgccgcggggctgcgcctggccggggacccgagcgcgggggacggcgcggccccgcgcgtgcgcgccgtgcttgtgggctacgacgagcacttctccttcgccaagctgagggaggcgtgcgcgcacctgcgcgaccccgagtgcctactcgtggccaccgaccgtgacccatggcacccgctgagcgacggcagccggacccctggcaccgggagcctggccgctgcagtggagacagcctcgggacgccaggccctggtggtgggcaagcccagcccctacatgttcgagtgcatcacggagaacttcagcatcgaccccgcacgcacgcttatggtgggtgaccgcctggagaccgacatcctctttggccaccgctgcggcatgaccactgtgctcacgctcacaggagtctcccgcctagaagaggcccaggcctacctagcggccggccagcacgacctcgtgccccattactatgtggagagcatcgcagacttgacagaggggttggaggactga

SEQ ID NO: 449 - DNA, 1644 bp, Homo sapiens
atggaggactctgaagcactgggcttcgaacacatgggcctcgatccccggctccttcaggctgtcaccgatctgggctggtcgcgacctacgctgatccaggagaaggccatcccactggccctagaagggaaggacctcctggctcgggcccgcacgggctccgggaagacggccgcttatgctattccgatgctgcagctgttgctccataggaaggcgacaggtccggtggtagaacaggcagtgagaggccttgttcttgttcctaccaaggagctggcacggcaagcacagtccatgattcagcagctggctacctactgtgctcgggatgtccgagtggccaatgtctcagctgctgaagactcagtctctcagagagctgtgctgatggagaagccagatgtggtagtagggaccccatctcgcatattaagccacttgcagcaagacagcctgaaacttcgtgactccctggagcttttggtggtggacgaagctgaccttcttttttcctttggctttgaagaagagctcaagagtctcctctgtcacttgccccggatttaccaggcttttctcatgtcagctacttttaacgaggacgtacaagcactcaaggagctgatattacataacccggttacccttaagttacaggagtcccagctgcctgggccagaccagttacagcagtttcaggtggtctgtgagactgaggaagacaaattcctcctgctgtatgccctgctcaagctgtcattgattcggggcaagtctctgctctttgtcaacactctagaacggagttaccggctacgcctgttcttggaacagttcagcatccccacctgtgtgctcaatggagagcttccactgcgctccaggtgccacatcatctcacagttcaaccaaggcttctacgactgtgtcatagcaactgatgctgaagtcctgggggccccagtcaagggcaagcgtcggggccgagggcccaaaggggacaaggcctctgatccggaagcaggtgtggcccggggcatagacttccaccatgtgtctgctgtgctcaactttgatcttcccccaacccctgaggcctacatccatcgagctggcaggacagcacgcgctaacaacccaggcatagtcttaacctttgtgcttcccacggagcagttccacttaggcaagattgaggagcttctcagtggagagaacaggggccccattctgctcccctaccagttccggatggaggagatcgagggcttccgctatcgctgcagggatgccatgcgctcagtgactaagcaggccattcgggaggcaagattgaaggagatcaaggaagagcttctgcattctgagaagcttaagacatactttgaagacaaccctagggacctccagctgctgcggcatgacctacctttgcaccccgcagtggtgaagccccacctgggccatgttcctgactacctggttcctcctgctctccgtggcctggtgcgccctcacaagaagcggaagaagctgtcttcctcttgtaggaaggccaagagagcaaagtcccagaacccactgcgcagcttcaagcacaaaggaaagaaattcagacccacagccaagccctcctga

SEQ ID NO: 450 - DNA, 1529 bp, Homo sapiens
cgtttggttccgcttcgctggcgcccgccgggctcttcccccgccgaggcctgtggtttgtggagtcgaatttccctgccaccagtgcccggttagcaggggcgccagcctgggcgcctgcgcggacggcgggcgtcgtcaccatggcagcatccgctggaggcccaggatcttggagtgaaaatatactggaatattttctgagaaatagccagattacagcagaagacggtgctgagatcacctggtatcatgcagctaaccacaaggcacaaacaaatgaggcactgaaaagtactgctcacatgatagaggctgatgtccttcttccaagtgatggatcagaacacagccagccaattatggcccatccccctgaaacaaacagtgataatactctacaggagtggctgactgaagttatgaaaagcaataaaggcatcaagctggatttcaaaagtctggcagttgtagaaccatccatgatgctcttggaaaatgtgaagaggcatctgaagcgtcctgtatggattaatgccgatattcttcctggtccaaatggaaatagcaaagtaatagatgcaaaaccatttttagacaccgtgacatccttctttccagacgtgacgttttccctgggttggacaacaggatggcatcctgagaaagtcaatgaagggtacagttggacaatggtgaaagagatggaatatatatgtaatgaactaagtcagcctgtaacgttccctgtcagagcagcattagtcaggcagtcttgttctcagttactttggctgttaaagaaatcaaacaggtacagcctgactatttggactggaaaaaatgataactattccgttgaagatttactttacattagagaccattttgacaaaaaacaagttttctatgacatcttggaaccacaaaaccatgaatttaaacaagccattggaatcaaagttaatctctaagaagaagattctcaattatttcctgtgttttggtttcataatccttctctccattggtctgaattaattaccatataaattatggttattgattgacgttccaagtcatctaatcaagaaacgtttattgtatgcttactctgtgggcatatgtccttataatagtgcacttacataaaagatttggaaagaagagatttatttacacacgtggcctagtctaataataattcaggaaaatgatactctgcaccccttcataaaaatagttttgataaactaaagatgattggcagaatccatatgtcataaaacaggtataaatcacatgtgcttggcacttgcattacagagattatgaaaaatatggtactcttttcctttttcctagaaaactggttattttagagataacaaaaaaggaagagggcttttaaaatgtttttaattttcacaggggtcagcagctgtctcatatcaagatctattaatccatttcctgaaactgtagattaaattagatagatctagaatttccatgtgattgagaagcat

SEQ ID NO: 451 - DNA, 1983 bp, Homo sapiens
atgaacccggacctgcgcagggagcgggattccgccagcttcaacccggagctgcttacacacatcctggacggcagccccgagaaaacccggcgccgccgagagatcgagaacatgatcctgaacgacccagacttccagcatgaggacttgaacttcctcactcgcagccagcgttatgaggtggctgtcaggaaaagtgccatcatggtgaagaagatgagggagtttggcatcgctgaccctgatgaaattatgtggtttaaaaattttgtgcaccgagggcggcctgagcctctggatcttcacttgggcatgttcctgcccaccttgcttcaccaggcaactgcggagcagcaggagcgcttcttcatgcccgcctggaacttggagatcattggcacttatgcccagacagagatgggtcatggaactcaccttcgaggcttggaaaccacagccacgtatgaccctgaaacccaggagttcattctcaacagtcctactgtgacctccattaaatggtggcctggtgggcttggaaagacttcaaatcatgcaatagttcttgcccagctcatcactaaggggaaatgctatggattacatgcctttatcgtacctattcgtgaaatcgggacccataagcctttgccaggaattaccgttggtgacatcggccccaaatttggttatgatgagatagacaatggctacctcaaaatggacaaccatcgtattcccagagaaaacatgctgatgaagtatgcccaggtgaagcctgatggcacatacgtgaaaccgctgagtaacaagctgacttacgggaccatggtgtttgtcaggtccttccttgtgggagaagctgctcgggctctgtctaaggcgtgcaccattgccatccgatacagcgctgtgaggcaccagtctgaaatcaagccaggtgaaccagaaccacagattttggattttcaaacccagcagtataaactctttccactcctggccactgcctatgccttccagtttgtgggcgcatacatgaaggagacctatcaccggattaacgaaggcattggtcaaggggacctgagtgaactgcctgagcttcatgccctcaccgctggactgaaggctttcacctcctggactgcaaacactggcattgaagcatgtcggatggcttgtggtgggcatggctattctcattgcagtggtcttccaaatatttatgtcaatttcaccccaagctgtacctttgagggagaaaacactgtcatgatgctccagacggctaggttcctgatgaaaagttatgatcaggtgcactcaggaaagttggtgtgtggcatggtgtcctatttgaacgacctgcccagtcagcgcatccagccacagcaggtagcagtctggccaaccatggtggatatcaacagccccgaaagcctaaccgaagcatataaactccgtgcagccagattagtagaaattgctgcaaaaaaccttcaaaaagaagtgattcacagaaaaagcaaggaggtagcttggaacctaacttctgttgaccttgttcgagcaagtgaggcacattgccactatgtggtagttaagctcttttcagaaaaactcctcaaaattcaagataaagccattcaagctgtcttaaggagtttatgtctgctgtattctctgtatggaatcagtcagaacgcgggggatttccttcaggggagcatcatgacagagcctcagattacacaagtaaaccagcgtgtaaaggagttactcactctgattcgctcagatgctgttgctttggttgatgcatttgattttcaggatgtgacacttggctctgtgcttggccgctatgatgggaatgtgtatgaaaacttgtttgagtgggctaagaactccccactgaacaaagcagaggtccacgaatcttacaagcacctgaagtcactgcagtccaagctctga

SEQ ID NO: 452 - DNA, 789 bp, Homo sapiens
atggccttgggattaaagtgcttccgcatggtccaccctacctttcgcaattatcttgcagcctctatcagacccgtttcagaagttacactgaagacagtgcatgaaagacaacatggccataggcaatacatggcctattcagctgtaccagtccgccattttgctaccaagaaagccaaagccaaagggaaaggacagtcccaaaccagagtgaatattaatgctgccttggttgaggatataatcaacttggaagaggtgaatgaagaaatgaagtctgtgatagaagctctcaaggataatttcaataagactctcaatataaggacctcaccaggatcccttgacaagattgctgtggtaactgctgacgggaagcttgctttaaaccagattagccagatctccatgaagtcgccacagctgattttggtgaatatggccagcttcccagagtgtacagctgcagctatcaaggctataagagaaagtggaatgaatctgaacccagaagtggaagggacgctaattcgggtacccattccccaagtaaccagagagcacagagaaatgctggtgaaactggccaaacagaacaccaacaaggccaaagactctttacggaaggttcgcaccaactcaatgaacaagctgaagaaatccaaggatacagtctcagaggacaccattaggctaatagagaaacagatcagccaaatggccgatgacacagtggcagaactggacaggcatctggcagtgaagaccaaagaactccttggatga

SEQ ID NO: 453 - DNA, 3357 bp, Homo sapiens
atggagccctccagagcgcttctcggctgcctagcgagcgccgccgctgccgccccgccgggggaggatggagcaggggccggggccgaggaggaggaggaggaggaggaggaggcggcggcggcggtgggccccggggagctgggctgcgacgcgccgctgccctactggacggccgtgttcgagtacgaggcggcgggcgaggacgagctgaccctgcggctgggcgacgtggtggaggtgctgtccaaggactcgcaggtgtccggcgacgagggctggtggaccgggcagctgaaccagcgggtgggcatcttccccagcaactacgtgaccccgcgcagcgccttctccagccgctgccagcccggcggcgaggaccccagttgctacccgcccattcagttgttagaaattgattttgcggagctcaccttggaagagattattggcatcgggggctttgggaaggtctatcgtgctttctggataggggatgaggttgctgtgaaagcagctcgccacgaccctgatgaggacatcagccagaccatagagaatgttcgccaagaggccaagctcttcgccatgctgaagcaccccaacatcattgccctaagaggggtatgtctgaaggagcccaacctctgcttggtcatggagtttgctcgtggaggacctttgaatagagtgttatctgggaaaaggattcccccagacatcctggtgaattgggctgtgcagattgccagagggatgaactacttacatgatgaggcaattgttcccatcatccaccgcgaccttaagtccagcaacatattgatcctccagaaggtggagaatggagacctgagcaacaagattctgaagatcactgattttggcctggctcgggaatggcaccgaaccaccaagatgagtgcggcagggacgtatgcttggatggcacccgaagtcatccgggcctccatgttttccaaaggcagtgatgtgtggagctatggggtgctactttgggagttgctgactggtgaggtgccctttcgaggcattgatggcttagcagtcgcttatggagtggccatgaacaaactcgcccttcctattccttctacgtgcccagaaccttttgccaaactcatggaagactgctggaatcctgatccccactcacgaccatctttcacgaatatcctggaccagctaaccaccatagaggagtctggtttctttgaaatgcccaaggactccttccactgcctgcaggacaactggaaacacgagattcaggagatgtttgaccaactcagggccaaagaaaaggaacttcgcacctgggaggaggagctgacgcgggctgcactgcagcagaagaaccaggaggaactgctgcggcgtcgggagcaggagctggccgagcgggagattgacatcctggaacgggagctcaacatcatcatccaccagctgtgccaggagaagccccgggtgaagaaacgcaagggcaagttcaggaagagccggctgaagctcaaggatggcaaccgcatcagcctcccttctgatttccagcacaagttcacggtgcaggcctcccctaccatggataaaaggaagagtcttatcaacagccgctccagtcctcctgcaagccccaccatcattcctcgccttcgagccatccagttgacaccaggtgaaagcagcaaaacctggggcaggagctcagtcgtcccaaaggaggaaggggaggaggaggagaagagggccccaaagaagaagggacggacgtgggggccagggacgcttggtcagaaggagcttgcctcgggagatgaaggatcccctcagagacgtgagaaagctaatggtttaagtaccccatcagaatctccacatttccacttgggcctcaagtccctggtagatggatataagcagtggtcgtccagtgcccccaacctggtgaagggcccaaggagtagcccggccctgccagggttcaccagccttatggagatggccttgctggcagccagttgggtggtgcccatcgacattgaagaggatgaggacagtgaaggcccagggagtggagagagtcgcctacagcattcacccagccagtcctacctctgtatcccattccctcgtggagaggatggcgatggcccctccagtgatggaatccatgaggagcccaccccagtcaactcggccacgagtacccctcagctgacgccaaccaacagcctcaagcggggcggtgcccaccaccgccgctgcgaggtggctctgctcggctgtggggctgttctggcagccacaggcctagggtttgacttgctggaagctggcaagtgccagctgcttcccctggaggagcctgagccaccagcccgggaggagaagaaaagacgggagggtctttttcagaggtccagccgtcctcgtcggagcaccagccccccatcccgaaagcttttcaagaaggaggagcccatgctgttgctaggagacccctctgcctccctgacgctgctctccctctcctccatctccgagtgcaactccacacgctccctgctgcgctccgacagcgatgaaattgtcgtgtatgagatgccagtcagcccagtcgaggcccctcccctgagtccatgtacccacaaccccctggtcaatgtccgagtagagcgcttcaaacgagatcctaaccaatctctgactcccacccatgtcaccctcaccaccccctcgcagcccagcagtcaccggcggactccttctgatggggcccttaagccagagactctcctagccagcaggagcccctccagcaatgggttgagccccagtcctggagcaggaatgttgaaaacccccagtcccagccgagacccaggtgaattcccccgtctccctgaccccaatgtggtcttccccccaaccccaaggcgctggaacactcagcaggactctaccttggagagacccaagactctggagtttctgcctcggccgcgtccttctgccaaccggcaacggctggacccttggtggtttgtgtcccccagccatgcccgcagcacctccccagccaacagctccagcacagagacgcccagcaacctggactcctgctttgctagcagtagcagcactgtagaggagcggcctggacttccagccctgctcccgttccaggcagggccgctgcccccgactgagcggacgctcctggacctggatgcagaggggcagagtcaggacagcaccgtgccgctgtgcagagcggaactgaacacacacaggcctgccccttatgagatccagcaggagttctggtcttag

SEQ ID NO: 454 - DNA, 706 bp, Homo sapiens
gtatcggccattatggccggggcccactggaaatggtgacctcacaggaagatgcatcttgtaggaggcagctgtgaggtctggttccccgacgtgctgcagcaagtgcctttgccctgcctgtgggctccctccatggccaactctgctatggacaccagagtactctgctgtgcggtcatctgtcttctgggggcaggtctctcaaatgccggcgtcatgcagaacccaagacacctggtcaggaggaggggacaggaggcaagactgagatgcagcccaatgaaaggacacagtcatgtttactggtatcggcagctcccagaggaaggtctgaaattcatggtttatctccagaaagaaaatatcatagatgagtcaggaatgccaaaggaacgattttctgctgaatttcccaaagagggccccagcatcctgaggatccagcaggtagtgcgaggagattcggcagcttatttctgtgccagctcctcgatttctggggccaacgtcctgactttcggggccggcagcaggctgaccgtgctggaggacctgaaaaacgtgttcccacccgaggtcgctgtgtttgagccatcagaagcagagatctcccacacccaaaaggccacactggtgtgcctggccacaggcttctaccccgaccacgtggagctgagctggtgggtgaatgggaaggaggtgc

SEQ ID NO: 455 - DNA, 4827 bp, Homo sapiens
atgagagaagccgctgccgcgctggtccctcctcccgcctttgccgtcacgcctgccgccgccatggaggagccgccgccaccgccgccgccgccaccaccgccaccggaacccgagaccgagtcagaacccgagtgctgcttggcggcgaggcaagagggcacattgggagattcagcttgcaagagtcctgaatctgatctagaagacttctccgatgaaacaaatacagagaatctttatggtacctctccccccagcacacctcgacagatgaaacgcatgtcaaccaaacatcagaggaataatgtggggaggccagccagtcggtctaatttgaaagaaaaaatgaatgcaccaaatcagcctccacataaagacactggaaaaacagtggagaatgtggaagaatacagctataagcaggagaaaaagatccgagcagctcttagaacaacagagcgtgatcgtaaaaaaaatgtacagtgctcattcatgttagactcagtgggtggatctttgccaaaaaaatcaattccagatgtggatctcaataagccttacctcagccttggctgtagcaatgctaagcttccagtatctgtgcccatgcctatagccagacctgcacgccagacttctaggactgactgtccagcagatcgtttaaagttttttgaaactttacgacttttgctaaagcttacctcagtctcaaagaaaaaagacagggagcaaagaggacaagaaaatacgtctggtttctggcttaaccgatctaacgaactgatctggttagagctacaagcctggcatgcaggacggacaattaacgaccaggacttctttttatatacagcccgtcaagccatcccagatattattaatgaaatccttactttcaaagtcgactatgggagcttcgcctttgttagagatagagctggttttaatggtacttcagtagaagggcagtgcaaagccactcctggaacaaagattgtaggttactcaacacatcatgagcatctccaacgccagagggtctcatttgagcaggtaaaacggataatggagctgctagagtacatagaagcactttatccatcattgcaggctcttcagaaggactatgaaaaatatgctgcaaaagacttccaggacagggtgcaggcactctgtttgtggttaaacatcacaaaagacttaaatcagaaattaaggattatgggcactgttttgggcatcaagaatttatcagacattggctggccagtgtttgaaatcccttcccctcgaccatccaaaggtaatgagccggagtatgagggtgatgacacagaaggagaattaaaggagttggaaagtagtacggatgagagtgaagaagaacaaatctctgatcctagggtaccggaaatcagacagcccatagataacagcttcgacatccagtcgcgggactgcatatccaagaagcttgagaggctcgaatctgaggatgattctcttggctggggagcaccagactggagcacagaagcaggctttagtagacattgtctgacttctatttatagaccatttgtagacaaagcactgaagcagatggggttaagaaagttaattttaagacttcacaagctaatggatggttccttgcaaagggcacgtatagcattggtaaagaacgatcgtccagtggagttttctgaatttccagatcccatgtggggttcagattatgtgcagttgtcaaggacaccaccttcatctgaggagaaatgcagtgctgtgtcgtgggaggagctgaaggccatggatttaccttcattcgaacctgccttcctagttctctgccgagtccttctgaatgtcatacatgagtgtctgaagttaagattggagcagagacctgctggagaaccatctctcttgagtattaagcagctggtgagagagtgtaaggaggtcctgaagggcggcctgctgatgaagcagtactaccagttcatgctgcaggaggttctggaggacttggagaagcccgactgcaacattgacgcttttgaagaggatctacataaaatgcttatggtgtattttgattacatgagaagctggatccaaatgctacagcaattacctcaagcatcgcatagtttaaaaaatctgttagaagaagaatggaatttcaccaaagaaataactcattacatacggggaggagaagcacaggccgggaagcttttctgtgacattgcaggaatgctgctgaaatctacaggaagttttttagaatttggcttacaggagagctgtgctgaattttggactagtgcggatgacagcagtgcttccgacgaaatcaggaggtctgttatagagatcagtcgagccctgaaggagctcttccatgaagccagagaaagggcttccaaagcacttggatttgctaaaatgttgagaaaggacctggaaatagcagcagaattcaggctttcagccccagttagagacctcctggatgttctgaaatcaaaacagtatgtcaaggtgcaaattcctgggttagaaaacttgcaaatgtttgttccagacactcttgctgaggagaagagtattattttgcagttactcaatgcagctgcaggaaaggactgttcaaaagattcagatgacgtactcatcgatgcctatctgcttctgaccaagcacggtgatcgagcccgtgattcagaggacagctggggcacctgggaggcacagcctgtcaaagtcgtgcctcaggtggagactgttgacaccctgagaagcatgcaggtggataatcttttactagttgtcatgcagtctgcgcatctcacaattcagagaaaagctttccagcagtccattgagggacttatgactctgtgccaggagcagacatccagtcagccggtcatcgccaaagctttgcagcagctgaagaatgatgcattggagctatgcaacaggataagcaatgccattgaccgcgtggaccacatgttcacatcagaatttgatgctgaggttgatgaatctgaatctgtcaccttgcaacagtactaccgagaagcaatgattcaggggtacaattttggatttgagtatcataaagaagttgttcgtttgatgtctggggagtttagacagaagataggagacaaatatataagctttgcccggaagtggatgaattatgtcctgactaaatgtgagagtggtagaggtacaagacccaggtgggcgactcaaggatttgattttctacaagcaattgaacctgcctttatttcagctttaccagaagatgacttcttgagtttacaagccttgatgaatgaatgcattggccatgtcataggaaaaccacacagtcctgttacaggtttgtaccttgccattcatcggaacagcccccgtcctatgaaggtacctcgatgccatagtgaccctcctaacccacacctcattatccccactccagagggattcagcactcggagcatgccttccgacgcgcggagccatggcagccctgctgctgctgctgctgctgctgctgctgctgttgctgccagtcggcccagcccctctggtggtgactctgtgctgcccaaatccatcagcagtgcccatgataccaggggttccagcgttcctgaaaatgatcgattggcttccatagctgctgaattgcagtttaggtccctgagtcgtcactcaagccccacggaggagcgagatgaaccagcatatccaagaggagattcaagtgggtccacaagaagaagttgggaacttcggacactaatcagccagagtaaagatactgcttctaaactaggacccatagaagctatccagaagtcagtccgattgtttgaagaaaagaggtaccgagaaatgaggagaaagaatatcattggtcaagtttgtgatacgcctaagtcctatgataatgttatgcacgttggcttgaggaaggtgaccttcaaatggcaaagaggaaacaaaattggagaaggccagtatgggaaggtgtacacctgcatcagcgtcgacaccggggagctgatggccatgaaagagattcgatttcaacctaatgaccataagactatcaaggaaactgcagacgaattgaaaatattcgaaggcatcaaacaccccaatctggttcggtattttggtgtggagctccatagagaagaaatgtacatcttcatggagtactgcgatgaggggactttagaagaggtgtcaaggctgggacttcaggaacatgtgattaggctgtattcaaagcagatcaccattgcgatcaacgtcctccatgagcatggcatagtccaccgtgacattaaaggtgccaatatcttccttacctcatctggattaatcaaactgggagattttggatgttcagtaaagctcaaaaacaatgcccagaccatgcctggtgaagtgaacagcaccctggggacagcagcatacatggcacctgaagtcatcactcgtgccaaaggagagggccatgggcgtgcggccgacatctggagtctggggtgtgttgtcatagagatggtgactggcaagaggccttggcatgagtatgagcacaactttcaaattatgtataaagtggggatgggacataagccaccaatccctgaaagattaagccctgaaggaaaggacttcctttctcactgccttgagagtgacccaaagatgagatggaccgccagccagctcctcgaccattcgtttgtcaaggtttgcacagatgaagaatga

SEQ ID NO: 456 - DNA, 1089 bp, Homo sapiens
atggaaagaggcggagaggccggtgtggtttggttcaggcgtccgggaattgcatctgtttttaggcctaatgtgggaacagctcatgagtgtaagacaagcctgtgtcttgtaggccgaccagatgtccctgtgccaggacagcagccgccctcaagcccacactggccctgtcctggagtccagcccggggtgggagacagcggggtgcgtggggagcacctgcggggtggaccggaagcagccaggaggaggcaggaacggggccctggacagacccttgacctgggctcctggtcagctccaggttggctcagggggggagatcgcaggcgtgggctgcgctgggaggagccacttccaccgacggaggcggcacgggctgcccagggtccgggccacgcggggcgggagaggtcggaacctgcagggggaagatcccggtgggtttgctggccaaggcgctcagagcctgcaggcttgggactgccggtcccatgcgttgaccccagggccgagatgaaagcacctgttcaccccgtcctgggggctccgggagacccaccgcagccgcggccagtggcccgagtggggcccgaagagtgtcccgcagagacccggcgggagctgccaggagctctgggattccagcggctggaaggtgagtgtgtctaccccgttctcctgatggcaagtcccctacgggggacgtggcgggtgccgtctgtgcctgttgtgggctgggaatcaggaacccgcgcttccgtcattgaggctccttctcctcctcctgggacccttagctgggggcacgggcagggggttcagggggagggtcgcctgggatctgtggcctggacgttggcagccacaggcggcctgcaccccttgcagaccgtgaattctctgccgggtcagagccgcggagccagtgtggaaacagcccaggacggttatgaaatgagcccgggggccacgacttgcttggccggttggacgtcctcaccctgccgccggggcctgcgtggggacgggtccggacagctgggacggtggggatgttgggacactgggaatgctgggatctga

SEQ ID NO: 457 - DNA, 2481 bp, Homo sapiens
atggagggcgccggcggcgcgaacgacaagaaaaagataagttctgaacgtcgaaaagaaaagtctcgagatgcagccagatctcggcgaagtaaagaatctgaagttttttatgagcttgctcatcagttgccacttccacataatgtgagttcgcatcttgataaggcctctgtgatgaggcttaccatcagctatttgcgtgtgaggaaacttctggatgctggtgatttggatattgaagatgacatgaaagcacagatgaattgcttttatttgaaagccttggatggttttgttatggttctcacagatgatggtgacatgatttacatttctgataatgtgaacaaatacatgggattaactcagtttgaactaactggacacagtgtgtttgattttactcatccatgtgaccatgaggaaatgagagaaatgcttacacacagaaatggccttgtgaaaaagggtaaagaacaaaacacacagcgaagcttttttctcagaatgaagtgtaccctaactagccgaggaagaactatgaacataaagtctgcaacatggaaggtattgcactgcacaggccacattcacgtatatgataccaacagtaaccaacctcagtgtgggtataagaaaccacctatgacctgcttggtgctgatttgtgaacccattcctcacccatcaaatattgaaattcctttagatagcaagactttcctcagtcgacacagcctggatatgaaattttcttattgtgatgaaagaattaccgaattgatgggatatgagccagaagaacttttaggccgctcaatttatgaatattatcatgctttggactctgatcatctgaccaaaactcatcatgatatgtttactaaaggacaagtcaccacaggacagtacaggatgcttgccaaaagaggtggatatgtctgggttgaaactcaagcaactgtcatatataacaccaagaattctcaaccacagtgcattgtatgtgtgaattacgttgtgagtggtattattcagcacgacttgattttctcccttcaacaaacagaatgtgtccttaaaccggttgaatcttcagatatgaaaatgactcagctattcaccaaagttgaatcagaagatacaagtagcctctttgacaaacttaagaaggaacctgatgctttaactttgctggccccagccgctggagacacaatcatatctttagattttggcagcaacgacacagaaactgatgaccagcaacttgaggaagtaccattatataatgatgtaatgctcccctcacccaacgaaaaattacagaatataaatttggcaatgtctccattacccaccgctgaaacgccaaagccacttcgaagtagtgctgaccctgcactcaatcaagaagttgcattaaaattagaaccaaatccagagtcactggaactttcttttaccatgccccagattcaggatcagacacctagtccttccgatggaagcactagacaaagttcacctgagcctaatagtcccagtgaatattgtttttatgtggatagtgatatggtcaatgaattcaagttggaattggtagaaaaactttttgctgaagacacagaagcaaagaacccattttctactcaggacacagatttagacttggagatgttagctccctatatcccaatggatgatgacttccagttacgttccttcgatcagttgtcaccattagaaagcagttccgcaagccctgaaagcgcaagtcctcaaagcacagttacagtattccagcagactcaaatacaagaacctactgctaatgccaccactaccactgccaccactgatgaattaaaaacagtgacaaaagaccgtatggaagacattaaaatattgattgcatctccatctcctacccacatacataaagaaactactagtgccacatcatcaccatatagagatactcaaagtcggacagcctcaccaaacagagcaggaaaaggagtcatagaacagacagaaaaatctcatccaagaagccctaacgtgttatctgtcgctttgagtcaaagaactacagttcctgaggaagaactaaatccaaagatactagctttgcagaatgctcagagaaagcgaaaaatggaacatgatggttcactttttcaagcagtaggaattggaacattattacagcagccagacgatcatgcagctactacatcactttcttggaaacgtgtaaaaggatgcaaatctagtgaacagaatggaatggagcaaaagacaattattttaataccctctgatttagcatgtagactgctggggcaatcaatggatgaaagtggattaccacagctgaccagttatgattgtgaagttaatgctcctatacaaggcagcagaaacctactgcagggtgaagaattactcagagctttggatcaagttaactga

SEQ ID NO: 458 - DNA, 579 bp, Homo sapiens
atgtcaaagctcggccgggccgcccggggcctcaggaagcccgaggtcggcggtgtgatccgggcgatcgtgcgggcaggcctggccatgcccgggcccccactaggcccagtgctgggtcagagaggcgtttccatcaaccagttttgcaaggagttcaatgagaggacaaaggacatcaaggaaggcattcctctgcctaccaagattttagtgaagcctgacaggacatttgaaattaagattggacagcccactgtttcctacttcctgaaggcagcagctgggattgaaaagggggcccggcaaacagggaaagaggtggcaggcctggtgaccttgaagcatgtgtatgagattgcccgcatcaaagctcaggatgaggcatttgccctgcaggatgtacccctgtcgtctgttgtccgctccatcatcgggtctgcccgttctctgggcattcgcgtggtgaaggacctcagttcagaagagcttgcagctttccagaaggaacgagccatcttcctggctgctcagaaggaggcagatttggctgcccaagaagaagctgccaagaagtga

SEQ ID NO: 459 - DNA, 2073 bp, Homo sapiens
atggctccctggcctgaattgggagatgcccagcccaaccccgataagtacctcgaaggggccgcaggtcagcagcccactgcccctgataaaagcaaagagaccaacaaaacagataacactgaggcacctgtaaccaagattgaacttctgccgtcctactccacggctacactgatagatgagcccactgaggtggatgacccctggaacctacccactcttcaggactcggggatcaagtggtcagagagagacaccaaagggaagattctctgtttcttccaagggattgggagattgattttacttctcggatttctctactttttcgtgtgctccctggatattcttagtagcgccttccagctggttggaggaaaaatggcaggacagttcttcagcaacagctctattatgtccaaccctttgttggggctggtgatcggggtgctggtgaccgtcttggtgcagagctccagcacctcaacgtccatcgttgtcagcatggtgtcctcttcattgctcactgttcgggctgccatccccattatcatgggggccaacattggaacgtcaatcaccaacactattgttgcgctcatgcaggtgggagatcggagtgagttcagaagagcttttgcaggagccactgtccatgacttcttcaactggctgtccgtgttggtgctcttgcccgtggaggtggccacccattacctcgagatcataacccagcttatagtggagagcttccacttcaagaatggagaagatgccccagatcttctgaaagtcatcactaagcccttcacaaagctcattgtccagctggataaaaaagttatcagccaaattgcaatgaacgatgaaaaagcgaaaaacaagagtcttgtcaagatttggtgcaaaacttttaccaacaagacccagattaacgtcactgttccctcgactgctaactgcacctccccttccctctgttggacggatggcatccaaaactggaccatgaagaatgtgacctacaaggagaacatcgccaaatgccagcatatctttgtgaatttccacctcccggatcttgctgtgggcaccatcttgctcatactctccctgctggtcctctgtggttgcctgatcatgattgtcaagatcctgggctctgtgctcaaggggcaggtcgccactgtcatcaagaagaccatcaacactgatttcccctttccctttgcatggttgactggctacctggccatcctcgtcggggcaggcatgaccttcatcgtacagagcagctctgtgttcacgtcggccttgacccccctgattggaatcggcgtgataaccattgagagggcttatccactcacgctgggctccaacatcggcaccaccaccaccgccatcctggccgccttagccagccctggcaatgcattgaggagttcactccagatcgccctgtgccactttttcttcaacatctccggcatcttgctgtggtacccgatcccgttcactcgcctgcccatccgcatggccaaggggctgggcaacatctctgccaagtatcgctggttcgccgtcttctacctgatcatcttcttcttcctgatcccgctgacggtgtttggcctctcgctggccggctggcgggtgctggttggtgtcggggttcccgtcgtcttcatcatcatcctggtactgtgcctccgactcctgcagtctcgctgcccacgcgtcctgccgaagaaactccagaactggaacttcctgccgctgtggatgcgctcgctgaagccctgggatgccgtcgtctccaagttcaccggctgcttccagatgcgctgctgctgctgctgccgcgtgtgctgccgcgcgtgctgcttgctgtgtgactgccccaagtgctgccgctgcagcaagtgctgcgaggacttggaggaggcgcaggaggggcaggatgtccctgtcaaggctcctgagacctttgataacataaccattagcagagaggctcagggtgaggtccctgcctcggactcaaagaccgaatgcacggccttgtag

SEQ ID NO: 460 - DNA, 729 bp, Homo sapiens
atggccgaaacagaagccctgtcgaagcttcgggaagacttcaggatgcagaataaatccgtctttattttgggcgccagcggagaaaccggcagagtgctcttaaaggaaatcctggagcagggcctgttttccaaagtcacgctcattggccggaggaagctcaccttcgacgaggaagcttataaaaatgtgaatcaagaagtggtggactttgaaaagttggatgactacgcctctgcctttcaaggtcatgatgttggattctgttgcctgggtaccaccagagggaaagctggggcggagggatttgttcgtgttgaccgagattatgtgctgaagtctgcagagctggcaaaagctggagggtgcaaacatttcaacttgctatcctctaaaggagctgataaatcaagcaattttttatatctacaagttaagggagaagtagaagccaaggttgaagaattaaaatttgatcgttactctgtatttaggcctggagttctgttatgtgataggcaagaatctcgcccaggtgaatggctggttagaaagttctttggctccttaccagactcttgggccagtgggcattctgtgcctgtggtgaccgtggttagagcaatgctgaacaatgtggtgagaccaagagacaagcagatggaactgctggagaacaaggccatccatgacctggggaaagcgcatggctctctcaagccatga

SEQ ID NO: 461 - DNA, 1545 bp, Homo sapiens
atggtgtgggaagtgaagacaaatcagatgcctaatgcagtacagaaactcctgttggtgatggacaagagagcctcaggaatgaatgactcattggagttgctgcagtgtaatgagaatttgccatcttcacctggatataactcctgtgatgaacacatggagcttgatgaccttcctgaacttcaggcagttcaaagtgatcctacccaatctggcatgtaccagctgagttcagatgtttcacatcaagaatacccaagatcatcttggaaccaaaatacctcagacataccagaaactacttaccgtgaaaatgaggtggactggctaacagaattggcaaatatcgcgaccagtccacaaagtccactgatgcagtgctcattttacaatagatcatctcctgtacacatcatagccactagcaaaagtttacattcctatgcacgccctccaccagtgtcctcttcttcgaagagtgaaccagccttccctcatcaccattggaaggaggaaacaccagtaagacacgaaagggcaaatagtgagtcagaatctggcattttctgcatgtcctccctgtcagatgatgatgatttgggatggtgcaattcctggccttcaactgtctggcactgttttttgaaaggcacacgactgtgctttcataagggaagcaataaggaatggcaagatgttgaagattttgctagagctgaaggctgtgataatgaggaagatcttcaaatgggcattcacaagggctatggttctgatggtctaaagttgttatcacatgaagaaagtgtatcatttggcgagtctgtactgaagttgacttttgatcctggtacagtagaagatggtttacttaccgtagagtgtaagctggaccaccctttctatgttaaaaataaaggttggtcatcattttatccaagcttgactgtggtacagcatggcattccatgttgtgaagttcatattggcgatgtatgtctacctcctggacaccccgatgccattaattttgatgattcaggtgtttttgatacatttaaaagctatgacttcacacctatggattcttctgcagtttatgtgttaagtagtatggctcgccagcgtcgtgcatctttgtcttgtggaggacctggtggtcaagactttgcaagatctggattcagtaaaaactgtggctcacctggatcatcacagctctcttccaattctttgtatgctaaagctgtcaaaaaccacagctcagggactgtgagtgccacttctcctaataagtgcaaaagaccaatgaatgccttcatgctttttgccaaaaaatacagagttgaatatactcagatgtatccagggaaagataacagagccataagtgtgatccttggtgacaggtggaagaaaatgaagaatgaagagagaagaatgtacacattagaagcaaaggctttggctgaagaacagaaacgtttaaatcctgactgttggaagaggaaaagaaccaattcaggctcacaacaacattaa

SEQ ID NO: 462 - DNA, 6379 bp, Homo sapiens
tgtatagtttatagaattagttttttagtggagttgatgatgcctttccagttactaaaaaatcttcatttagcattcagtcgtagtacctgggaatcatggaggtggggagtgaatgaattgccatgtgggaggaagtgagagtaagtggaaagtggcttttccaggctgacatttgatgccattgggatctctgatttttttcctctctccctcccctccccctgaggaaacaatgcccttttgataataatttgctctctgcctgcctgacaagtactcagctgagatttctcagccaacaagacagtacaaacacttgcggtaccaagcaccactttctcaaaccctggcctcattgaggtgataacaactgtcctgctcaagggattccccctttccccctcttcctcactccttcccccacctcctcttggtgttatacagggatatcatgtccatttataaggagcctcctccaggaatgttcgttgtacctgatactgttgacatgactaaggtatgtaacttgatgggggtttggggggttttgggaaattgggggccataaggttgcaaaagcctaaaagagattattcagctcacctctccgattacacagatgaagaaatcaagaccccaggagagtaagtggcttgtccaaggtcacatagtgaggtggagcagcactttgaagaggtgtctgttattagtgtaccccataggtactgattggcttggaaaatcccagttcatgtctgttgtcgcagcttgactatttatagggcattctttcactctcaaaaatgctcctgtttggataataaattatatggtcaccctatccattgtactacccagctcttcccccatcccgttactcttgacattaactatgctatggtactataaatcagatgtagggaaggttgggaatagggcaagcttgactgaagtgtttgtggttaaaggactttgctcaggatcctgtccttactggttgcgtttaagtatcccttccaccccaaagactatacctctcttgtcctcctctcagagagaaagcttaatacataatgtcacatttctctggcatagatacctaggtttctctgtcactgaatgctctacccacagaagtgcagttgcacttaaactgatgttagaaagaaatcatatttcctaaacctaatgctgtttaagtgaaacacatagttttcttacagtaaatttcttacagtaaaaattcagattttgtattgttggtgtatctttttttgttgttttgaatagatttcccttcatattttttttttatgtagttagaaatgtttttcctaggacatctcgtcctcagtcaagtaccagtgttaatagcctagtacctggggtcccagagttgatgccatgttgagaccagttgagtttactgttccaaatgactgagagccagaatatgacgtagggtcttgccaggagggcaaggtgggaactatagacttaggcattggattgccacgtccctttccttttgctgttcaaatgcttagcagacctaaatgcctaggagcctttgtggaagaagaaatataactgagtcagttcaggttttcctcccttcagggggggaaatcctgttgaagaattatggcttgagggggaagagaatttagtgtcgttttcaggacggctgatttttttttttttttttttttaaacagtattggggaaagttctgggactggtctaatggctctgagtggaccctgagtcttccccattttcagtcatgatgtgctgcctgagccacatcctccacaataggtttgatcctctgcagaggaagcaagcagataccctaggcatccatcacaccccctaaccctgctgtgttactggcactgggctgtggcctccaatccctttcttcgtctcctttcatcatactttcccttcgtgccacataaatgtagggtggggttgcatcatatgcatgtttggcctgggcaaatccaaacatatattcagtcaaaatctgtgtcgatttctcaaaattaaaaacgctagggttatattttatagataagcatattatatttttccacagtggtgttttatccattatatgtaacactgatcagggaggtctgcacaaaaaaaaaaaatgctttaagagagttttaggggatactcaagagtgattttgactagattcagttttcgccttgggctctaactttagaagtaacccctgagtaagatgtcattccactgtaatgagatttcttaaaattccaaacctacgtattagtatgagtgaatacaggatgttccttctgcatggtgaggatatagaacatgtgtaccagattatggactctgcttctggtgtgggtagtaggtggagggtagccaggagggcttggggtgggtcatcacctcacaattttgagatggggttttattttgcagattcatgcattgatcacaggcccatttgacactccttatgaagggggtttcttcctgttcgtgtttcggtgtccgcccgactatcccatccacccacctcgggtcaaactgatgacaacgggcaataacacagtgaggtttaaccccaacttctaccgcaatgggaaagtctgcttgagtattctaggtacatggactggacctgcctggagcccagcccagagcatctcctcagtgctcatctctatccagtccctgatgactgagaacccctatcacaatgagcccggctttgaacaggagagacatccaggagacagcaaaaactataatgaatgtatccggcacgagaccatcagagttgcagtctgtgacatgatggaaggaaagtgtccctgtcctgaacccctacgaggggtgatggagaagtcctttctggagtattacgacttctacgaggtggcctgcaaagatcgcctgcaccttcaaggccaaactatgcaggacccttttggagagaagcggggccactttgactaccagtccctcttgatgcgcctgggactgatacgtcagaaagtgctggagaggctccataatgagaatgcagaaatggactctgatagcagttcatctgggacagagacagaccttcatgggagcctgagggtttagaccctgctcccatctccccttcccccactcaagagtcccagcagaatcccttccccccaccccagggatggagaggcactgtgtatctccctccagactcgaagtcatcctgcaagatggcaagaaccaagcaagctccgatcccagggtgtgggagtgggggcctgttcccggtctgacctccttggcactggagcatctggggcttcgttcatccattcatcccgtatcaggggccaaggtacctttacaggagcacctagagcgagggcctttggcaaaaacaaaacaaccaacacacctctccacagggccagctccttagggataagtggaagatggaaattgcaattccaagagggagtgtgcccaaatgatttatggggatacctggaagggagcttggggtgggggctgtctgtgacacttaagcagtctgggtggttgtctatttgtctgtcttcagtcttgaagcagggcttcccaatgcccttttcctccctgccttccttcccccattatttcccacaggccagcataattttgtttttcctaatttatagtcactgttctagacagaccaaagagaaggaacagtggtggagtctaggctgctgatcagtaagctttacctagcacctgagcacctttctcccctcccctctttcctcacccttttctagatgtaagacagaaagtaaatgtgactgggacttaaccaaggtcttggtaaagcctgcatggcaccgtaagaagctgaaaatactgtttgttcccgcaatcactgatttgaaaagttcccaacacaggcagctgctgtgtatatgggattagagccactacatagaatagtctcttacagattttcataaatactagtcacaataagggtatttttcttgggggtggagtaagggggagactgatgctagtccttgttgtattttgttgggctgtccttgtgtattttcaccccagcctgtagtcctcctcacttcaaccccagggatttttggggagcaagggtagccaatggcagagggggttggggctgggactctggaggctcctccccttctttctcttccttccgcctcccccgtgcccccagctgctcttgtcactgtctctgatgggtatttgcctggctttgttgcttctctatctgtatttagctgcagtgatcctttagctggttggctcagaaaaaaaaaaatgtgctttaggtgccctgtaatcctgggcatcaagggaatccatccttcccctttttgatatgttctccccgtacttccagatttattgttatggctcccagtgggtattggcgattcttgtgatgcagggcctcagtcagtgtccagccatgcataagggagaggatagtgtgtacctgccctgccctctgctatgaaggtctctgccttgtggatcatgggactccccttggaggatctgtgcaaaggggggctgggcacaaaggagaatgtcctatttgggagggcaggaagcaaaggaactggacagggattggtgggcttggggaacggaagtttatcttggatacccttgaagaggctgggtctcttcacatgaagatcgaaaagggaccctgcttccaatttccctcttccattcctcgagctactccagggcttagaagaatgctcttggtctgtgggtccagtgttgtctgtcatccatttaagtgttcccactttcaagtgacaatcctctccttggccctgccatagggcagagcatgtctggcatagcagcctgacttttatgccctaatcttgagttgaggaaatatatgcacaggagtcaaagagatgtctttatatctgactgtatataaatgaagtttttttgttttttttgttttcctttttggtgcaataaagtttgttttggcagaaggaggaagtgcctgtgggtgtgggagggcttgtgtaaaggacgaatgggatcatcttgtcaaccacacctcacctaggcctggaactgttagggagaaggaaagtgccatgaattgtctggaaaccgaagacttgcataacatggtggaagggcagggctgggtggggagagcaggacaagttttctcattggaaatggggtccatgctctggcagtcagtgacatcttagtttgagtggtttccaaagacagacctattccagagcttggagtgagcatgtcctacaaggataggcagaggaagagatgggcccaggctatatcctgctaaaggaagggtctcagtatggaaaaaccattgagttttcagatttccagtactaaactagcacttttaggatcttagcctttagaccataaggactttgggagccttaaacaactctggcctcttccctcatcaccacttctacttgctataggagattcttgctttctgatgcagaggcttttactcttggctgaccacgtgtgtagaaaaatgtctacacacagtatgtgctgccattctgtactatgcagtgatacatgaaggcatgggctcgggttaataggcctaggcaccagctttagctcggctgaagctggcggcccctggcaaattactttgattgaatcacctgtgatgttgaaggctgcctacttggtgaaatttaagtgagctgtatgtaaaatggcacagggtaggtgttcagtaaatgactccctttcccactactgaggctagagggacctggcaatcactacaggagggtgagaaagctagtagggaatttaagaaaatagaacattccctaactattgtttgattcccctcagattccattgttttctttcctccaatttagccacgattggacattgacttctatttccttcatactcacagctaactctgtcataacctagagcctctacagaggaagccagaagagactgaaagtgaatattatttactggtccattaggaccagctagtttgagataaggaacattttatttaaaaggtttgaattagcataggctgtaatctatgtctcacagctacaaagactagacaggccaggaaacaacccacattctaggcccagctcttccatgaacttgcagatgacctacaaaaatcattttatatgtgcttgccgttctctgtgttaatcagattatgcttactgaacgagcgaggttttcctccaataaaaatgcaacgtgaaggcacttttcaaaaataaaagaatgagggaagaaa

SEQ ID NO: 463 - DNA, 867 bp, Homo sapiens
attgggctgagtcggagacttcctttcctgattggccgtgttgtacggcggcttctcgcgcagctgatgacctggaagtgatgcctaaagctgtggaccgcgtgggctcgcctccctgggactaggtttcagcggccgctgcgatgaccaaaataaaggcagatcccgacgggcccgaggctcaggcggaggcgtgttccggggagcgcacctaccaggagctgctggtcaaccagaaccccatcgcgcagcccctggcttctcgccgcctcacgcggaagctctacaaatgcatcaagaaagcggtgaagcagaagcagattcggcgcggggtgaaagaggttcagaaatttgtcaacaaaggagaaaaagggatcatggttttggcaggagacacactgcccattgaggtatactgccatctcccagtcatgtgtgaggaccgaaatttgccctatgtctatatcccctctaagacggacctgggtgcagccgcaggctccaagcgccccacctgtgtgataatggtcaagccccatgaggagtaccaggaggcttacgatgagtgcctggaggaggtgcagtccctgcccctacccctatgaggggctccggtagcacctgggcacctgccgctggaagctattgggctggcagcaggacgactggctgtcctcctgcccacccacactgacggcatcttcccagttccccaaggcacgccttcttcccaggcagctctaacagccctttcatgaaggtaatgctagtcttctgtccatcagtgccatttcctgtagaactaaaggctgttccaagaatgtggggtggggaaagtaaatgctaagactaaaaaaaaaaaaaaaa

SEQ ID NO: 464 - DNA, 3924 bp, Homo sapiens
atggagctggaggacggtgtggtgtatcaggaggagcccggcggctccggggccgtgatgtcggagcgggtgtccggcctggccggctccatctaccgcgagttcgagcggcttatcgggcgctatgacgaggaggtggtcaaagagctgatgccgctggtggtggctgtgctggagaacctggactcggtgttcgcgcaggaccaggagcaccaggtggagctggagctgctgcgggacgacaacgagcagctcatcacccagtacgagcgggagaaggcgctgcgcaagcacgctgaggagaaattcattgaatttgaagactctcaagaacaggaaaaaaaggacttacagacccgagtggaatctttagaatctcaaacaagacaacttgagctgaaagcgaaaaactatgctgaccagattagcagacttgaagaaagagaagcagaactgaagaaggaatataatgcattacatcaaagacacactgagatgatccataattatatggaacatttagaaagaacaaaacttcatcagctctcagggagtgatcaactagaatccacagctcatagtagaattagaaaagaacgccctatatcattaggaattttcccattacctgctggagatggattgcttacacctgatgctcagaaaggaggagagacccctggatctgagcaatggaaatttcaggaattaagtcaaccacgttctcataccagcctgaaggatgagctttctgatgttagccaaggcggatctaaagctaccactccagcatcaacagctaattcagatgtggcaacaattcctactgatactcccttaaaggaagaaaacgaaggatttgtgaaggttacagatgcgccaaataaatcagagataagcaaacacattgaagtacaggtagcccaggaaactagaaatgtatctactggctctgctgaaaatgaagaaaagtcagaagttcaagcaatcatcgaatctactcctgagctggatatggacaaagatctcagtggatataaaggttcaagcactcccaccaaaggcatagagaacaaagcttttgatcgcaatacagaatctctctttgaagaactgtcttcagctggctcaggcctaataggagatgtggatgaaggagcagatttactaggaatgggtcgggaagttgagaatcttatattagaaaatacacaactgttggaaaccaaaaatgctttgaacatagtgaagaatgatttgatagcaaaagtggatgaactgacctgtgagaaagatgtgctgcaaggggaattggaggctgtgaagcaagccaaactgaaactagaggaaaagaacagagaattggaggaagagcttaggaaagctcgggcagaagctgaagatgcaaggcaaaaagcaaaagatgacgatgatagtgatattcccacagcccagaggaaacggtttactagagtagaaatggcccgtgttctcatggagcgaaaccagtataaagagagattgatggagcttcaggaagctgttcgatggacagagatgattcgggcatcacgagaaaatccagccatgcaggaaaaaaaaaggtcaagcatttggcagtttttcagccgacttttcagctcctcaagtaacacgactaagaagcctgaaccacctgttaatctgaagtacaatgcacccacgtctcatgttactccgtccgtcaagaaaagaagcagcaccttatctcagctccctggggataagtccaaagcctttgatttccttagtgaagaaactgaagctagtttagcctcacgcagagaacaaaagagagagcagtatcgtcaggtaaaagcacatgttcagaaggaagacggtagagtgcaggcttttggctggagtctgcctcagaagtacaaacaggtaaccaatggtcaaggtgaaaataagatgaaaaatttacctgtgcctgtctatctcagacctctggatgaaaaagatacatcaatgaagctgtggtgtgctgttggagtcaatttatctggtgggaagaccagagatggtggttctgttgttggagcaagtgtattttacaaggatgttgctggtttggatacagaaggcagtaaacagcgaagtgcctctcagagtagtttagataagttagatcaggaacttaaggaacagcagaaggagttaaaaaatcaagaagaattatccagtctagtttggatctgtaccagcactcattcggctacaaaagttcttattattgatgctgttcaacctggcaacatcctagacagtttcactgtttgcaactctcatgttctgtgcattgcaagtgtgccaggtgcacgagaaacagactaccctgcaggagaagatctttcagaatctggtcaggtagacaaagcatctttatgtggaagtatgacaagcaacagctcagcagagacagacagcctgttaggaggcatcacagtggttggttgttctgcagaaggtgtgacgggagctgccacttcccctagtacaaatggtgcttctccagtgatggataaaccaccagaaatggaagcagaaaatagtgaggttgatgaaaatgttccaacagcagaagaagcaactgaagctacagaagggaatgcggggtcagctgaagacacagtggacatctcccaaactggcgtctacacagagcatgtctttacagatcctttgggagttcagatcccagaagacctctccccagtgtatcagtcgagcaatgactcagatgcatataaagatcaaatatcagtactgccaaatgaacaagacttggtgagagaagaagcccagaaaatgagtagtcttttaccaactatgtggcttggagctcaaaatggctgtttgtatgtccattcatctgtagcccagtggaggaaatgtctccattccattaaacttaaagattcgattctcagtattgtacacgtgaagggaatcgtgttagtagccctggctgacggcacccttgcaatctttcacagaggagtggatgggcagtgggatttgtcaaactatcacctcttagaccttggacggcctcatcattccatccgttgcatgactgtggtacatgacaaagtctggtgtggctataggaacaaaatctatgtggtgcagccaaaggccatgaaaatagagaaatcttttgatgcacatcccaggaaggagagccaagtgcgacagcttgcgtgggtgggggatggcgtgtgggtctccattcgcttggattctacgctccgtctctatcatgcacacacttatcaacatctacaggatgtggacattgagccttatgtaagcaaaatgttaggtactggaaaactgggcttctcttttgtgagaattacagctcttatggtgtcttgtaatcgtttgtgggtggggacaggaaatggtgtcattatctccatcccattgacagaaacaaataaaacctcaggtgtaccaggaaatcgtcctggaagtgtaatccgtgtatatggtgatgaaaacagtgataaagtgactccagggacatttataccctattgttcaatggcacatgcacagctttgcttccatgggcaccgggatgctgtgaaattctttgtggcagtcccaggtcaagtcatcagcccacaaagtagcagtagtggcacggatctgacgggtgacaaagcagggccatctgcacaggagcctggtagtcagacgcccttgaagtctatgcttgtcatcagtggaggagagggctacatcgacttccgaatgggtgatgaaggtggagaatcagaacttcttggagaggatcttccacttgaaccttctgtcaccaaagcagaaaggagtcacttgatagtgtggcaagtgatgtatggcaatgagtga

SEQ ID NO: 465 - DNA, 7584 bp, Homo sapiens
atggctagtggcagctgtcaggggtgcgaagaggacgaggaaactctgaagaagttgatagtcaggctgaacaatgtccaggaaggaaaacagatagaaacgctggtccaaatcctggaggatctgctggtgttcacgtactccgagcgcgcctccaagttatttcaaggcaaaaatatccatgtgcctctgttgatcgtcttggactcctatatgagagtcgcgagtgtgcagcaggtgggttggtcacttctgtgcaaattaatagaagtctgtccaggtacaatgcaaagcttaatgggaccccaggatgttggaaatgattgggaagtccttggtgttcaccaattgattcttaaaatgctaacagttcataatgccagtgtaaacttgtcagtgattggactgaagaccttagatctcctcctaacttcaggtaaaatcaccttgctgatattggatgaagaaagtgatattttcatgttaatttttgatgccatgcactcatttccagccaatgatgaagtccagaaacttggatgcaaagctttacatgtgctgtttgagagagtctcagaggagcaactgactgaatttgttgagaacaaagattatatgatattgttaagtgcgttaacaaattttaaagatgaagaggaaattgtgcttcatgtgctgcattgtttacattccctagcgattccttgcaataatgtggaagtcctcatgagtggcaatgtcaggtgttataatattgtggtggaagctatgaaagcattccctatgagtgaaagaattcaagaagtgagttgctgtttgctccataggcttacattaggtaattttttcaatatcctggtattaaacgaagtccatgagtttgtggtgaaagctgtgcagcagtacccagagaatgcagcattgcagatctcagcgctcagctgtttggccctcctcactgagactattttcttaaatcaagatttagaggaaaagaatgagaatcaagagaatgatgatgagggggaagaagataaattgttttggctggaagcctgttacaaagcattaacgtggcatagaaagaacaagcacgtgcaggaggccgcatgctgggcactaaataatctccttatgtaccaaaacagtttacatgagaagattggagatgaagatggccatttcccagctcatagggaagtgatgctctccatgctgatgcattcttcatcaaaggaagttttccaggcatctgcgaatgcattgtcaactctcttagaacaaaatgttaatttcagaaaaatactgttatcaaaaggaatacacctgaatgttttggagttaatgcagaagcatatacattctcctgaagtggctgaaagtggctgtaaaatgctaaatcatctttttgaaggaagcaacacttccctggatataatggcagcagtggtccccaaaatactaacagttatgaaacgtcatgagacatcattaccagtgcagctggaggcgcttcgagctattttacattttatagtgcctggcatgccagaagaatccagggaggatacagaatttcatcataagctaaatatggttaaaaaacagtgtttcaagaatgatattcacaaactggtcctagcagctttgaacaggttcattggaaatcctgggattcagaaatgtggattaaaagtaatttcttctattgtacattttcctgatgcattagagatgttatccctggaaggtgctatggattcagtgcttcacacactgcagatgtatccagatgaccaagaaattcagtgtctgggtttaagtcttataggatacttgattacaaagaagaatgtgttcataggaactggacatctgctggcaaaaattctggtttccagcttataccgatttaaggatgttgctgaaatacagactaaaggatttcagacaatcttagcaatcctcaaattgtcagcatctttttctaagctgctggtgcatcattcatttgacttagtaatattccatcaaatgtcttccaatatcatggaacaaaaggatcaacagtttctaaacctctgttgcaagtgttttgcaaaagtagctatggatgattacttaaaaaatgtgatgctagagagagcgtgtgatcagaataacagcatcatggttgaatgcttgcttctattgggagcagatgccaatcaagcaaaggagggatcttctttaatttgtcaggtatgtgagaaagagagcagtcccaaattggtggaactcttactgaatagtggatctcgtgaacaagatgtacgaaaagcgttgacgataagcattgggaaaggtgacagccagatcatcagcttgctcttaaggaggctggccctggatgtggccaacaatagcatttgccttggaggattttgtataggaaaagttgaaccttcttggcttggtcctttatttccagataagacttctaatttaaggaaacaaacaaatatagcatctacactagcaagaatggtgatcagatatcagatgaaaagtgctgtggaagaaggaacagcctcaggcagcgatggaaatttttctgaagatgtgctgtctaaatttgatgaatggacctttattcctgactcttctatggacagtgtgtttgctcaaagtgatgacctggatagtgaaggaagtgaaggctcatttcttgtgaaaaagaaatctaattcaattagtgtaggagaattttaccgagatgccgtattacagcgttgctcaccaaatttgcaaagacattccaattccttggggcccatttttgatcatgaagatttactgaagcgaaaaagaaaaatattatcttcagatgattcactcaggtcatcaaaacttcaatcccatatgaggcattcagacagcatttcttctctggcttctgagagagaatatattacatcactagacctttcagcaaatgaactaagagatattgatgccctaagccagaaatgctgtataagtgttcatttggagcatcttgaaaagctggagcttcaccagaatgcactcacgagctttccacaacagctatgtgaaactctgaagagtttgacacatttggacttgcacagtaataaatttacatcatttccttcttatttgttgaaaatgagttgtattgctaatcttgatgtctctcgaaatgacattggaccctcagtggttttagatcctacagtgaaatgtccaactctgaaacagtttaacctgtcatataaccagctgtcttttgtacctgagaacctcactgatgtggtagagaaactggagcagctcattttagaaggaaataaaatatcagggatatgctcccccttgagactgaaggaactgaagattttaaaccttagtaagaaccacatttcatccctatcagagaactttcttgaggcttgtcctaaagtggagagtttcagtgccagaatgaattttcttgctgctatgcctttcttgcctccttctatgacaatcctaaaattatctcagaacaaattttcctgtattccagaagcaattttaaatcttccacacttgcggtctttagatatgagcagcaatgatattcagtacctaccaggtcccgcacactggaaatctttgaacttaagggaactcttatttagccataatcagatcagcatcttggacttgagtgaaaaagcatatttatggtctagagtagagaaactgcatctttctcacaataaactgaaagagattcctcctgagattggctgtcttgaaaatctgacatctctggatgtcagttacaacttggaactaagatcctttcccaatgaaatggggaaattaagcaaaatatgggatcttcctttggatgaactgcatcttaactttgattttaaacatataggatgtaaagccaaagacatcataaggtttcttcaacagcgattaaaaaaggctgtgccttataaccgaatgaaacttatgattgtgggaaatactgggagtggtaaaaccaccttattgcagcaattaatgaaaaccaagaaatcagatcttggaatgcaaagtgccacagttggcatagatgtgaaagactggcctatccaaataagagacaaaagaaagagagatctcgtcctaaatgtgtgggattttgcaggtcgtgaggaattctatagtactcatccccattttatgacgcagcgagcattgtaccttgctgtctatgacctcagcaagggacaggctgaagttgatgccatgaagccttggctcttcaatataaaggctcgcgcttcttcttcccctgtgattctcgttggcacacatttggatgtttctgatgagaagcaacgcaaagcctgcatgagtaaaatcaccaaggaactcctgaataagcgagggttccctgccatacgagattaccactttgtgaatgccaccgaggaatctgatgctttggcaaaacttcggaaaaccatcataaacgagagccttaatttcaagatccgagatcagcttgttgttggacagctgattccagactgctatgtagaacttgaaaaaatcattttatcggagcgtaaaaatgtgccaattgaatttcccgtaattgaccggaaacgattattacaactagtgagagaaaatcagctgcagttagatgaaaatgagcttcctcacgcagttcactttctaaatgaatcaggagtccttcttcattttcaagacccagcactgcagttaagtgacttgtactttgtggaacccaagtggctttgtaaaatcatggcacagattttgacagtgaaagtggaaggttgtccaaaacaccctaagggcattatttcgcgtagagatgtggaaaaatttctttcaaaaaaaaggaaatttccaaagaactacatgtcacagtattttaagctcctagaaaaattccagattgctttgccaataggagaagaatatttgctggttccaagcagtttgtctgaccacaggcctgtgatagagcttccccattgtgagaactctgaaattatcatccgactatatgaaatgccttattttccaatgggattttggtcaagattaatcaatcgattacttgagatttcaccttacatgctttcagggagagaacgagcacttcgcccaaacagaatgtattggcgacaaggcatttacttaaattggtctcctgaagcttattgtctggtaggatctgaagtcttagacaatcatccagagagtttcttaaaaattacagttccttcttgtagaaaaggctgtattcttttgggccaagttgtggaccacattgattctctcatggaagaatggtttcctgggttgctggagattgatatttgtggtgaaggagaaactctgttgaagaaatgggcattatatagttttaatgatggtgaagaacatcaaaaaatcttacttgatgacttgatgaagaaagcagaggaaggagatctcttagtaaatccagatcaaccaaggctcaccattccaatatctcagattgcccctgacttgattttggctgacctgcctagaaatattatgttgaataatgatgagttggaatttgaacaagctccagagtttctcctaggtgatggcagttttggatcagtttaccgagcagcctatgaaggagaagaagtggctgtgaagatttttaataaacatacatcactcaggctgttaagacaagagcttgtggtgctttgccacctccaccaccccagtttgatatctttgctggcagctgggattcgtccccggatgttggtgatggagttagcctccaagggttccttggatcgcctgcttcagcaggacaaagccagcctcactagaaccctacagcacaggattgcactccacgtagctgatggtttgagatacctccactcagccatgattatataccgagacctgaaaccccacaatgtgctgcttttcacactgtatcccaatgctgccatcattgcaaagattgctgactacggcattgctcagtactgctgtagaatggggataaaaacatcagagggcacaccagggtttcgtgcacctgaagttgccagaggaaatgtcatttataaccaacaggctgatgtttattcatttggtttactactctatgacattttgacaactggaggtagaatagtagagggtttgaagtttccaaatgagtttgatgaattagaaatacaaggaaaattacctgatccagttaaagaatatggttgtgccccatggcctatggttgagaaattaattaaacagtgtttgaaagaaaatcctcaagaaaggcctacttctgcccaggtctttgacattttgaattcagctgaattagtctgtctgacgagacgcattttattacctaaaaacgtaattgttgaatgcatggttgctacacatcacaacagcaggaatgcaagcatttggctgggctgtgggcacaccgacagaggacagctctcatttcttgacttaaatactgaaggatacacttctgaggaagttgctgatagtagaatattgtgcttagccttggtgcatcttcctgttgaaaaggaaagctggattgtgtctgggacacagtctggtactctcctggtcatcaataccgaagatgggaaaaagagacataccctagaaaagatgactgattctgtcacttgtttgtattgcaattccttttccaagcaaagcaaacaaaaaaattttcttttggttggaaccgctgatggcaagttagcaatttttgaagataagactgttaagcttaaaggagctgctcctttgaagatactaaatataggaaatgtcagtactccattgatgtgtttgagtgaatccacaaattcaacggaaagaaatgtaatgtggggaggatgtggcacaaagattttctccttttctaatgatttcaccattcagaaactcattgagacaagaacaagccaactgttttcttatgcagctttcagtgattccaacatcataacagtggtggtagacactgctctctatattgctaagcaaaatagccctgttgtggaagtgtgggataagaaaactgaaaaactctgtggactaatagactgcgtgcactttttaagggaggtaatggtaaaagaaaacaaggaatcaaaacacaaaatgtcttattctgggagagtgaaaaccctctgccttcagaagaacactgctctttggataggaactggaggaggccatattttactcctggatctttcaactcgtcgacttatacgtgtaatttacaacttttgtaattcggtcagagtcatgatgacagcacagctaggaagccttaaaaatgtcatgctggtattgggctacaaccggaaaaatactgaaggtacacaaaagcagaaagagatacaatcttgcttgaccgtttgggacatcaatcttccacatgaagtgcaaaatttagaaaaacacattgaagtgagaaaagaattagctgaaaaaatgagacgaacatctgttgagtaa

SEQ ID NO: 466 - DNA, 771 bp, Homo sapiens
atgggggagcccagtagagaggagtataaaatccagtcctttgatgcagagacccagcagctgctgaagacagcactcaaagttgcctgctttgagacagaagatggagaatattccgtttgccagaggagctatagtaattgctctcgcctgatgccttcccgctgtaacacgcagtacagagatccgggtgctgtggacttggagaaagtggccaatgtgattgtggaccattctctgcaggactgtgtgttcagcaaggaagcaggacgcatgtgctacgccatcattcaggcagagagtaaacaagcaggccagagtgtcttccgacgtggactcctcaaccggctgcagcaggagtaccaggctcgggagcagctgcgagcacgctccctgcagggctgggtctgctatgtcacctttatctgcaacatctttgactacctgagggtgaacaacatgcccatgatggccctggtgaaccctgtctatgactgcctcttccggctggcccagccagacagtttgagcaaggaggaggaggtggactgtttggtgctgcagctgcaccgggttggggagcagctggagaaaatgaatgggcagcgcatggatgagctctttgtgctgatccgggatggcttcctgctcccaactggcctcagctccctggcccagctgctgctgctggagatcattgagttccgggcggccggctggaagacaacgccagctgcccacaagtattactacagcgaagtctccgactag

SEQ ID NO: 467 - DNA, 1119 bp, Homo sapiens
atggcaaagcagtacgactcggtggagtgccctttttgtgatgaagtttccaaatacgagaagctcgccaagatcggccaaggcaccttcggggaggtgttcaaggccaggcaccgcaagaccggccagaaggtggctctgaagaaggtgctgatggaaaacgagaaggaggggttccccattacagccttgcgggagatcaagatccttcagcttctaaaacacgagaatgtggtcaacttgattgagatttgtcgaaccaaagcttccccctataaccgctgcaagggtagtatatacctggtgttcgacttctgcgagcatgaccttgctgggctgttgagcaatgttttggtcaagttcacgctgtctgagatcaagagggtgatgcagatgctgcttaacggcctctactacatccacagaaacaagatcctgcatagggacatgaaggctgctaatgtgcttatcactcgtgatggggtcctgaagctggcagactttgggctggcccgggccttcagcctggccaagaacagccagcccaaccgctacaccaaccgtgtggtgacactctggtaccggcccccggagctgttgctcggggagcgggactacggcccccccattgacctgtggggtgctgggtgcatcatggcagagatgtggacccgcagccccatcatgcagggcaacacggagcagcaccaactcgccctcatcagtcagctctgcggctccatcacccctgaggtgtggccaaacgtggacaactatgagctgtacgaaaagctggagctggtcaagggccagaagcggaaggtgaaggacaggctgaaggcctatgtgcgtgacccatacgcactggacctcatcgacaagctgctggtgctggaccctgcccagcgcatcgacagcgatgacgccctcaaccacgacttcttctggtccgaccccatgccctccgacctcaagggcatgctctccacccacctgacgtccatgttcgagtacttggcaccaccgcgccggaagggcagccagatcacccagcagtccaccaaccagagtcgcaatcccgccaccaccaaccagacggagtttgagcgcgtcttctga

SEQ ID NO: 468 - DNA, 723 bp, Homo sapiens
atgccagtctctaagtgcccaaaaaagtcggagtccctgtggaaggggtgggaccggaaggcccagaggaacggcctgcggagccaggtatacgctgtgaatggcgactactatgtgggcgagtggaaggacaacgtgaaacacgggaaaggaacacaggtctggaagaagaaaggagccatctatgagggggactggaagtttgggaagcgagacggctacggcaccctcagccttcctgaccaacagacaggaaagtgcaggagagtctactcaggctggtggaaaggtgataagaaatcgggttatgggatccagtttttcggacccaaggagtattatgagggtgactggtgtggcagccagcgcagcgggtggggccgcatgtattacagcaacggcgacatctacgagggacagtgggagaacgacaagcccaacggggagggcatgctgcgcctgaagaacgggaaccgctacgagggctgctgggagagaggcatgaagaacggggcggggcgtttcttccatctggaccacggccagctgtttgaaggcttctgggtggacaatatggccaaatgcgggacgatgatcgactttggccgtgacgaggcccctgagcccactcagttccccattcctgaggtcaaaatcctagaccctgatggtgtgctggcggaggccttggccatgttcaggaagacagaggaaggagattga

SEQ ID NO: 469 - DNA, 1767 bp, Homo sapiens
atggcaagcaaaaaacgagaagtccagttacagacagtcatcaataatcaaagcctgtgggatgagatgttgcagaacaaaggcttaacagtgattgatgtttaccaagcctggtgtggaccttgcagagcaatgcaacctttattcagaaaattgaaaaatgaactgaacgaagacgaaattctgcattttgctgtcgcagaagctgacaacattgtgactttgcagccatttagagataaatgtgaacctgtttttctctttagtgttaatggcaaaattatcgaaaagattcagggtgcaaatgcaccgcttgttaataaaaaagttattaatttgatcgatgaggagagaaaaattgcagcaggtgaaatggctcgacctcagtatcctgaaattccattagtagactcagattcagaagttagtgaagaatcaccatgtgaaagtgttcaggaattatacagtattgctattatcaaaccggatgctgtgattagtaaaaaagttctagaaattaaaagaaaaattaccaaagctggatttattatagaagcagagcataagacagtgctcactgaagaacaagttgtcaacttctatagtcgaatagcagaccagtgtgacttcgaagagtttgtctcttttatgacaagtggcttaagctatattctagttgtatctcaaggaagtaaacacaatcctccctctgaagaaaccgaaccacagactgacaccgaacctaacgaacgatctgaggatcaacctgaggtcgaagcccaggttacacctggaatgatgaagaacaaacaagacagtttacaagaatatctggaaagacaacatttagctcagctctgtgacattgaagaggatgcagctaatgttgctaagttcatggatgctttcttccccgattttaaaaaaatgaaaagcatgaaattagaaaagacattggcattacttcgaccaaatctctttcatgaaaggaaagatgatgttttgcgtattattaaagatgaagacttcaaaatactggagcaaagacaagtagtattatcggaaaaagaagcacaagcactgtgcaaggaatatgaaaatgaagactattttaataaacttatagaaaacatgaccagtggtccatctctagcccttgttttattgagagacaatggcttgcaatactggaaacaattactgggaccaagaactgttgaagaagccattgaatattttccagagagtttatgtgcacagtttgcgatggacagtttgccggtcaaccagttgtatggcagcgattcattagaaaccgctgaaagggaaatacagcatttctttcctcttcaaagcactttaggcttgattaaacctcatgcaacaagtgaacaaagagagcagatcctgaagatagttaaggaggctggatttgatctgacacaggtgaagaaaatgttcctaactcctgagcaaatagagaaaatttatccaaaagtaacaggaaaagacttttataaagatttattggaaatgttatctgtgggtccatctatggtcatgattctgaccaagtggaatgctgttgcagaatggagacgattgatgggcccaacagacccagaagaagcaaaattactttcccctgactccatccgagcccagtttggaataagtaaattgaaaaacattgtccatggagcatctaacgcctatgaagcaaaagaggttgttaatagactctttgaggatcctgaggaaaactaa

SEQ ID NO: 470 - DNA, 2273 bp, Homo sapiens
gccttagctcccgcgctagagagaaacatgtatcgttttcgatcacagctcttcacggggatttctgctgccgccaccgcccactcttacccccgccgcttctcgactctgttgttagccgaagactcgcctctcagccgcccgccgcacagacgcacgagtaaaaagtgcagctccatcggctgatcctcgctaagctccgactctgggcggcaccgggcgtcccacgatgccgaagaacaagaagcggaacactccccaccgcggtagcagtgctggcggcggcgggtcaggagcagccgcagcgacggcggcgacagcaggtggccagcatcgaaatgttcagccttttagtgatgaagatgcatcaattgaaacaatgagccattgcagtggttatagcgatccttccagttttgctgaagatggaccagaagtccttgatgaggaaggaactcaagaagacctagagtacaagttgaagggattaattgacctaaccctggataagagtgcgaagacaaggcaagcagctcttgaaggtattaaaaatgcactggcttcaaaaatgctgtatgaatttattctggaaaggagaatgactttaactgatagcattgaacgctgcctgaaaaaaggtaagagtgatgagcaacgtgcagctgcagcgttagcatctgttctttgtattcagctgggccctggaattgaaagtgaagagattttgaaaactcttggaccaatcctaaagaaaatcatttgtgatgggtcagctagtatgcaggctaggcaaacttgtgcaacttgctttggtgtttgctgttttattgccacagatgacattactgaactatactcaactctggaatgtttggaaaatatcttcactaaatcctatctcaaagagaaagacactactgttatttgcagcactcctaatacagtgcttcatatcagctctcttcttgcatggacactactgctgaccatatgcccaatcaatgaagtgaagaaaaagcttgagatgcatttccataagcttccaagcctcctctcttgtgatgatgtaaacatgagaatagctgctggtgaatctttggcacttctctttgaattggccagaggaatagagagtgactttttttatgaagacatggagtccttgacgcagatgcttagggccttggcaacagatggaaataaacaccgggccaaagtggacaagagaaagcagcggtcagttttcagagatgtcctgagggcagtggaggaacgggattttccaacagaaaccattaaatttggtcctgaacgcatgtatattgattgctgggtaaaaaaacacacctatgacacctttaaggaggttcttggatcagggatgcagtaccacttgcagtcaaatgaattccttcgaaatgtatttgaacttggacccccagtgatgcttgatgctgcaacgcttaaaacgatgaagatttctcgtttcgaaaggcatttatataactctgcagccttcaaagctcgaaccaaagctagaagcaaatgtcgagataagagagcagatgttggagaattcttctagattttcagaacttgaagactattttctaatttctatttttttttctatttcaatgtatttaaactctagacacagtttttatcctggattaacttagataacttttgtagcagtggttatattgcttataatttaatgtacaatactattgaaactggtgagttctgattattaaatattctctgtaaatcagtaaacatgtataaagtatttgtaatgtttggtcataatttatttatgaagacagcaaaagactgatttcatgatggggaaaacaattagccaaagtttaatttcttacactgtggttgtcaagaatactgatttactataatgatatatacatgcaagatatttaacttaatatcttagacaagagttctgggtacaattttgggatctagttcccctggaaaagctgctgtatttttaatttttaatggaatgtagcttttaaaatcctgtcactggcatcaacaaaaggaattataccatgagaccttatagctgtacttaaaagccattcagttcagctattgggagttcatgatgaattagcatatgccagaaaggttgctaaccttaacatctgagagcagtaacactgattttatctgctgtatgagactttgtgcattttactttgaaataaagatttttttccacactgaaaaaaaaaaaaaaaaaa

SEQ ID NO: 471 - DNA, 175 bp, Homo sapiens
tttttttttaaggttttattgtaactcttcttactagcattccccaaaccataacaaataggtgacatagtcaagagaatatcaatgttcaccaccctttgacctagtaaattcacttacaaaatttatcctaagaaaatcatcagagatgctaataaatgtatgtactacaatg

SEQ ID NO: 472 - DNA, 14982 bp, Homo sapiens
ctgcttcacttcacggggcgaacatggcgcacagctgtcggtggcgcttccccgcccgacccgggaccaccgggggcggcggcggcggggggcgccggggcctagggggcgccccgcggcaacgcgtcccggccctgctgcttccccccgggcccccggtcggcggtggcggccccggggcgcccccctcccccccggctgtggcggccgcggcggcggcggcgggaagcagcggggctggggttccagggggagcggccgccgcctcagcagcctcctcgtcgtccgcctcgtcttcgtcttcgtcatcgtcctcagcctcttcagggccggccctgctccgggtgggcccgggcttcgacgcggcgctgcaggtctcggccgccatcggcaccaacctgcgccggttccgggccgtgtttggggagagcggcgggggaggcggcagcggagaggatgagcaattcttaggttttggctcagatgaagaagtcagagtgcgaagtcccacaaggtctccttcagttaaaactagtcctcgaaaacctcgtgggagacctagaagtggctctgaccgaaattcagctatcctctcagatccatctgtgttttcccctctaaataaatcagagaccaaatctggagataagatcaagaagaaagattctaaaagtatagaaaagaagagaggaagacctcccaccttccctggagtaaaaatcaaaataacacatggaaaggacatttcagagttaccaaagggaaacaaagaagatagcctgaaaaaaattaaaaggacaccttctgctacgtttcagcaagccacaaagattaaaaaattaagagcaggtaaactctctcctctcaagtctaagtttaagacagggaagcttcaaataggaaggaagggggtacaaattgtacgacggagaggaaggcctccatcaacagaaaggataaagaccccttcgggtctcctcattaattctgaactggaaaagccccagaaagtccggaaagacaaggaaggaacacctccacttacaaaagaagataagacagttgtcagacaaagccctcgaaggattaagccagttaggattattccttcttcaaaaaggacagatgcaaccattgctaagcaactcttacagagggcaaaaaagggggctcaaaagaaaattgaaaaagaagcagctcagctgcagggaagaaaggtgaagacacaggtcaaaaatattcgacagttcatcatgcctgttgtcagtgctatctcctcgcggatcattaagacccctcggcggtttatagaggatgaggattatgaccctccaattaaaattgcccgattagagtctacaccgaatagtagattcagtgccccgtcctgtggatcttctgaaaaatcaagtgcagcttctcagcactcctctcaaatgtcttcagactcctctcgatctagtagccccagtgttgatacctccacagactctcaggcttctgaggagattcaggtacttcctgaggagcggagcgatacccctgaagttcatcctccactgcccatttcccagtccccagaaaatgagagtaatgataggagaagcagaaggtattcagtgtcggagagaagttttggatctagaacgacgaaaaaattatcaactctacaaagtgccccccagcagcagacctcctcgtctccacctccacctctgctgactccaccgccaccactgcagccagcctccagtatctctgaccacacaccttggcttatgcctccaacaatccccttagcatcaccatttttgcctgcttccactgctcctatgcaagggaagcgaaaatctattttgcgagaaccgacatttaggtggacttctttaaagcattctaggtcagagccacaatacttttcctcagcaaagtatgccaaagaaggtcttattcgcaaaccaatatttgataatttccgaccccctccactaactcccgaggacgttggctttgcatctggtttttctgcatctggtaccgctgcttcagcccgattgttttcgccactccattctggaacaaggtttgatatgcacaaaaggagccctcttctgagagctccaagatttactccaagtgaggctcactctagaatatttgagtctgtaaccttgcctagtaatcgaacttctgctggaacatcttcttcaggagtatccaatagaaaaaggaaaagaaaagtgtttagtcctattcgatctgaaccaagatctccttctcactccatgaggacaagaagtggaaggcttagtagttctgagctctcacctctcacccccccgtcttctgtctcttcctcgttaagcatttctgttagtcctcttgccactagtgccttaaacccaacttttacttttccttctcattccctgactcagtctggggaatctgcagagaaaaatcagagaccaaggaagcagactagtgctccggcagagccattttcatcaagtagtcctactcctctcttcccttggtttaccccaggctctcagactgaaagagggagaaataaagacaaggcccccgaggagctgtccaaagatcgagatgctgacaagagcgtggagaaggacaagagtagagagagagaccgggagagagaaaaggagaataagcgggagtcaaggaaagagaaaaggaaaaagggatcagaaattcagagtagttctgctttgtatcctgtgggtagggtttccaaagagaaggttgttggtgaagatgttgccacttcatcttctgccaaaaaagcaacagggcggaagaagtcttcatcacatgattctgggactgatattacttctgtgactcttggggatacaacagctgtcaaaaccaaaatacttataaagaaagggagaggaaatctggaaaaaaccaacttggacctcggcccaactgccccatccctggagaaggagaaaaccctctgcctttccactccttcatctagcactgttaaacattccacttcctccataggctccatgttggctcaggcagacaagcttccaatgactgacaagagggttgccagcctcctaaaaaaggccaaagctcagctctgcaagattgagaagagtaagagtcttaaacaaaccgaccagcccaaagcacagggtcaagaaagtgactcatcagagacctctgtgcgaggaccccggattaaacatgtctgcagaagagcagctgttgcccttggccgaaaacgagctgtgtttcctgatgacatgcccaccctgagtgccttaccatgggaagaacgagaaaagattttgtcttccatggggaatgatgacaagtcatcaattgctggctcagaagatgctgaacctcttgctccacccatcaaaccaattaaacctgtcactagaaacaaggcaccccaggaacctccagtaaagaaaggacgtcgatcgaggcggtgtgggcagtgtcccggctgccaggtgcctgaggactgtggtgtttgtactaattgcttagataagcccaagtttggtggtcgcaatataaagaagcagtgctgcaagatgagaaaatgtcagaatctacaatggatgccttccaaagcctacctgcagaagcaagctaaagctgtgaaaaagaaagagaaaaagtctaagaccagtgaaaagaaagacagcaaagagagcagtgttgtgaagaacgtggtggactctagtcagaaacctaccccatcagcaagagaggatcctgccccaaagaaaagcagtagtgagcctcctccacgaaagcccgtcgaggaaaagagtgaagaagggaatgtctcggcccctgggcctgaatccaaacaggccaccactccagcttccaggaagtcaagcaagcaggtctcccagccagcactggtcatcccgcctcagccacctactacaggaccgccaagaaaagaagttcccaaaaccactcctagtgagcccaagaaaaagcagcctccaccaccagaatcaggtccagagcagagcaaacagaaaaaagtggctccccgcccaagtatccctgtaaaacaaaaaccaaaagaaaaggaaaaaccacctccggtcaataagcaggagaatgcaggcactttgaacatcctcagcactctctccaatggcaatagttctaagcaaaaaattccagcagatggagtccacaggatcagagtggactttaaggaggattgtgaagcagaaaatgtgtgggagatgggaggcttaggaatcttgacttctgttcctataacacccagggtggtttgctttctctgtgccagtagtgggcatgtagagtttgtgtattgccaagtctgttgtgagcccttccacaagttttgtttagaggagaacgagcgccctctggaggaccagctggaaaattggtgttgtcgtcgttgcaaattctgtcacgtttgtggaaggcaacatcaggctacaaagcagctgctggagtgtaataagtgccgaaacagctatcaccctgagtgcctgggaccaaactaccccaccaaacccacaaagaagaagaaagtctggatctgtaccaagtgtgttcgctgtaagagctgtggatccacaactccaggcaaagggtgggatgcacagtggtctcatgatttctcactgtgtcatgattgcgccaagctctttgctaaaggaaacttctgccctctctgtgacaaatgttatgatgatgatgactatgagagtaagatgatgcaatgtggaaagtgtgatcgctgggtccattccaaatgtgagaatctttcagatgagatgtatgagattctatctaatctgccagaaagtgtggcctacacttgtgtgaactgtactgagcggcaccctgcagagtggcgactggcccttgaaaaagagctgcagatttctctgaagcaagttctgacagctttgttgaattctcggactaccagccatttgctacgctaccggcaggctgccaagcctccagacttaaatcccgagacagaggagagtataccttcccgcagctcccccgaaggacctgatccaccagttcttactgaggtcagcaaacaggatgatcagcagcctttagatctagaaggagtcaagaggaagatggaccaagggaattacacatctgtgttggagttcagtgatgatattgtgaagatcattcaagcagccattaattcagatggaggacagccagaaattaaaaaagccaacagcatggtcaagtccttcttcattcggcaaatggaacgtgtttttccatggttcagtgtcaaaaagtccaggttttgggagccaaataaagtatcaagcaacagtgggatgttaccaaacgcagtgcttccaccttcacttgaccataattatgctcagtggcaggagcgagaggaaaacagccacactgagcagcctcctttaatgaagaaaatcattccagctcccaaacccaaaggtcctggagaaccagactcaccaactcctctgcatcctcctacaccaccaattttgagtactgataggagtcgagaagacagtccagagctgaacccacccccaggcatagaagacaatagacagtgtgcgttatgtttgacttatggtgatgacagtgctaatgatgctggtcgtttactatatattggccaaaatgagtggacacatgtaaattgtgctttgtggtcagcggaagtgtttgaagatgatgacggatcactaaagaatgtgcatatggctgtgatcaggggcaagcagctgagatgtgaattctgccaaaagccaggagccaccgtgggttgctgtctcacatcctgcaccagcaactatcacttcatgtgttcccgagccaagaactgtgtctttctggatgataaaaaagtatattgccaacgacatcgggatttgatcaaaggcgaagtggttcctgagaatggatttgaagttttcagaagagtgtttgtggactttgaaggaatcagcttgagaaggaagtttctcaatggcttggaaccagaaaatatccacatgatgattgggtctatgacaatcgactgcttaggaattctaaatgatctctccgactgtgaagataagctctttcctattggatatcagtgttccagggtatactggagcaccacagatgctcgcaagcgctgtgtatatacatgcaagatagtggagtgccgtcctccagtcgtagagccggatatcaacagcactgttgaacatgatgaaaacaggaccattgcccatagtccaacatcttttacagaaagttcatcaaaagagagtcaaaacacagctgaaattataagtcctccatcaccagaccgacctcctcattcacaaacctctggctcctgttattatcatgtcatctcaaaggtccccaggattcgaacacccagttattctccaacacagagatcccctggctgtcgaccgttgccttctgcaggaagtcctaccccaaccactcatgaaatagtcacagtaggtgatcctttactctcctctggacttcgaagcattggctccaggcgtcacagtacctcttccttatcaccccagcggtccaaactccggataatgtctccaatgagaactgggaatacttactctaggaataatgtttcctcagtctccaccaccgggaccgctactgatcttgaatcaagtgccaaagtagttgatcatgtcttagggccactgaattcaagtactagtttagggcaaaacacttccacctcttcaaatttgcaaaggacagtggttactgtaggcaataaaaacagtcacttggatggatcttcatcttcagaaatgaagcagtccagtgcttcagacttggtgtccaagagctcctctttaaagggagagaagaccaaagtgctgagttccaagagctcagagggatctgcacataatgtggcttaccctggaattcctaaactggccccacaggttcataacacaacatctagagaactgaatgttagtaaaatcggctcctttgctgaaccctcttcagtgtcgttttcttctaaagaggccctctccttcccacacctccatttgagagggcaaaggaatgatcgagaccaacacacagattctacccaatcagcaaactcctctccagatgaagatactgaagtcaaaaccttgaagctatctggaatgagcaacagatcatccattatcaacgaacatatgggatctagttccagagataggagacagaaagggaaaaaatcctgtaaagaaactttcaaagaaaagcattccagtaaatcttttttggaacctggtcaggtgacaactggtgaggaaggaaacttgaagccagagtttatggatgaggttttgactcctgagtatatgggccaacgaccatgtaacaatgtttcttctgataagattggtgataaaggcctttctatgccaggagtccccaaagctccacccatgcaagtagaaggatctgccaaggaattacaggcaccacggaaacgcacagtcaaagtgacactgacacctctaaaaatggaaaatgagagtcaatccaaaaatgccctgaaagaaagtagtcctgcttcccctttgcaaatagagtcaacatctcccacagaaccaatttcagcctctgaaaatccaggagatggtccagtggcccaaccaagccccaataatacctcatgccaggattctcaaagtaacaactatcagaatcttccagtacaggacagaaacctaatgcttccagatggccccaaacctcaggaggatggctcttttaaaaggaggtatccccgtcgcagtgcccgtgcacgttctaacatgttttttgggcttaccccactctatggagtaagatcctatggtgaagaagacattccattctacagcagctcaactgggaagaagcgaggcaagagatcagctgaaggacaggtggatggggccgatgacttaagcacttcagatgaagacgacttatactattacaacttcactagaacagtgatttcttcaggtggagaggaacgactggcatcccataatttatttcgggaggaggaacagtgtgatcttccaaaaatctcacagttggatggtgttgatgatgggacagagagtgatactagtgtcacagccacaacaaggaaaagcagccagattccaaaaagaaatggtaaagaaaatggaacagagaacttaaagattgatagacctgaagatgctggggagaaagaacatgtcactaagagttctgttggccacaaaaatgagccaaagatggataactgccattctgtaagcagagttaaaacacagggacaagattccttggaagctcagctcagctcattggagtcaagccgcagagtccacacaagtaccccctccgacaaaaatttactggacacctataatactgagctcctgaaatcagattcagacaataacaacagtgatgactgtgggaatatcctgccttcagacattatggactttgtactaaagaatactccatccatgcaggctttgggtgagagcccagagtcatcttcatcagaactcctgaatcttggtgaaggattgggtcttgacagtaatcgtgaaaaagacatgggtctttttgaagtattttctcagcagctgcctacaacagaacctgtggatagtagtgtctcttcctctatctcagcagaggaacagtttgagttgcctctagagctaccatctgatctgtctgtcttgaccacccggagtcccactgtccccagccagaatcccagtagactagctgttatctcagactcaggggagaagagagtaaccatcacagaaaaatctgtagcctcctctgaaagtgacccagcactgctgagcccaggagtagatccaactcctgaaggccacatgactcctgatcattttatccaaggacacatggatgcagaccacatctctagccctccttgtggttcagtagagcaaggtcatggcaacaatcaggatttaactaggaacagtagcacccctggccttcaggtacctgtttccccaactgttcccatccagaaccagaagtatgtgcccaattctactgatagtcctggcccgtctcagatttccaatgcagctgtccagaccactccaccccacctgaagccagccactgagaaactcatagttgttaaccagaacatgcagccactttatgttctccaaactcttccaaatggagtgacccaaaaaatccaattgacctcttctgttagttctacacccagtgtgatggagacaaatacttcagtattgggacccatgggaggtggtctcacccttaccacaggactaaatccaagcttgccaacttctcaatctttgttcccttctgctagcaaaggattgctacccatgtctcatcaccagcacttacattccttccctgcagctactcaaagtagtttcccaccaaacatcagcaatcctccttcaggcctgcttattggggttcagcctcctccggatccccaacttttggtttcagaatccagccagaggacagacctcagtaccacagtagccactccatcctctggactcaagaaaagacccatatctcgtctacagacccgaaagaataaaaaacttgctccctctagtaccccttcaaacattgccccttctgatgtggtttctaatatgacattgattaacttcacaccctcccagcttcctaatcatccaagtctgttagatttggggtcacttaatacttcatctcaccgaactgtccccaacatcataaaaagatctaaatctagcatcatgtattttgaaccggcacccctgttaccacagagtgtgggaggaactgctgccacagcggcaggcacatcaacaataagccaggatactagccacctcacatcagggtctgtgtctggcttggcatccagttcctctgtcttgaatgttgtatccatgcaaactaccacaacccctacaagtagtgcgtcagttccaggacacgtcaccttaaccaacccaaggttgcttggtaccccagatattggctcaataagcaatcttttaatcaaagctagccagcagagcctggggattcaggaccagcctgtggctttaccgccaagttcaggaatgtttccacaactggggacatcacagaccccctctactgctgcaataacagcggcatctagcatctgtgtgctcccctccactcagactacgggcataacagccgcttcaccttctggggaagcagacgaacactatcagcttcagcatgtgaaccagctccttgccagcaaaactgggattcattcttcccagcgtgatcttgattctgcttcagggccccaggtatccaactttacccagacggtagacgctcctaatagcatgggactggagcagaacaaggctttatcctcagctgtgcaagccagccccacctctcctgggggttctccatcctctccatcttctggacagcggtcagcaagcccttcagtgccgggtcccactaaacccaaaccaaaaaccaaacggtttcagctgcctctagacaaagggaatggcaagaagcacaaagtttcccatttgcggaccagttcttctgaagcacacattccagaccaagaaacgacatccctgacctcaggcacagggactccaggagcagaggctgagcagcaggatacagctagcgtggagcagtcctcccagaaggagtgtgggcaacctgcagggcaagtcgctgttcttccggaagttcaggtgacccaaaatccagcaaatgaacaagaaagtgcagaacctaaaacagtggaagaagaggaaagtaatttcagctccccactgatgctttggcttcagcaagaacaaaagcggaaggaaagcattactgagaaaaaacccaagaaaggacttgtttttgaaatttccagtgatgatggctttcagatctgtgcagaaagtattgaagatgcctggaagtcattgacagataaagtccaggaagctcgatcaaatgcccgcctaaagcagctctcatttgcaggtgttaacggtttgaggatgctggggattctccatgatgcagttgtgttcctcattgagcagctgtctggtgccaagcactgtcgaaattacaaattccgtttccacaagccagaggaggccaatgaaccccccttgaaccctcacggctcagccagggctgaagtccacctcaggaagtcagcatttgacatgtttaacttcctggcttctaaacatcgtcagcctcctgaatacaaccccaatgatgaagaagaggaggaggtacagctgaagtcagctcggagggcaactagcatggatctgccaatgcccatgcgcttccggcacttaaaaaagacttctaaggaggcagttggtgtctacaggtctcccatccatggccggggtcttttctgtaagagaaacattgatgcaggtgagatggtgattgagtatgccggcaacgtcatccgctccatccagactgacaagcgggaaaagtattacgacagcaagggcattggttgctatatgttccgaattgatgactcagaggtagtggatgccaccatgcatggaaatgctgcacgcttcatcaatcactcgtgtgagcctaactgctattctcgggtcatcaatattgatgggcagaagcacattgtcatctttgccatgcgtaagatctaccgaggagaggaactcacttacgactataagttccccattgaggatgccagcaacaagctgccctgcaactgtggcgccaagaaatgccggaagttcctaaactaaagctgctcttctcccccagtgttggagtgcaaggaggcggggccatccaaagcaacgctgaaggccttttccagcagctgggagctcccggattgcgtggcacagctgaggggcctctgtgatggctgagctctcttatgtcctatactcacatcagacatgtgatcatagtcccagagacagagttgaggtctcgaagaaaagatccatgatcggctttctcctggggcccctccaattgtttactgttagaaagtgggaatggggtccctagcagacttgcctggaaggagcctattatagagggttggttatgttgggagattgggcctgaatttctccacagaaataagttgccatcctcaggttggccctttcccaagcactgtaagtgagtgggtcaggcaaagccccaaatggagggttggttagattcctgacagtttgccagccaggccccacctacagcgtctgtcgaacaaacagaggtctggtggttttccctactatcctcccactcgagagttcacttctggttgggagacaggattcctagcacctccggtgtcaaaaggctgtcatggggttgtgccaattaattaccaaacattgagcctgcaggctttgagtgggagtgttgcccccaggagccttatctcagccaattacctttcttgacagtaggagcggcttccctctcccattccctcttcactcccttttcttcctttcccctgtcttcatgccactgctttcccatgcttctttcgggttgtaggggagactgactgcctgctcaaggacactccctgctgggcataggatgtgcctgcaaaaagttccctgagcctgtaagcactccaggtggggaagtggacaggagccattggtcataaccagacagaatttggaaacattttcataaagctccatggagagttttaaagaaacatatgtagcatgattttgtaggagaggaaaaagattatttaaataggatttaaatcatgcaacaacgagagtatcacagccaggatgacccttgggtcccattcctaagacatggttactttattttccccttgttaagacataggaagacttaatttttaaacggtcagtgtccagttgaaggcagaacactaatcagatttcaaggcccacaacttggggactagaccaccttatgttgagggaactctgccacctgcgtgcaacccacagctaaagtaaattcaatgacactactgccctgattactccttaggatgtggtcaaaacagcatcaaatgtttcttctcttcctttccccaagacagagtcctgaacctgttaaattaagtcattggattttactctgttctgtttacagtttactatttaaggttttataaatgtaaatatattttgtatatttttctatgagaagcacttcatagggagaagcacttatgacaaggctattttttaaaccgcggtattatcctaatttaaaagaagatcggtttttaataattttttattttcataggatgaagttagagaaaatattcagctgtacacacaaagtctggtttttcctgcccaacttccccctggaaggtgtactttttgttgtttaatgtgtagcttgtttgtgccctgttgacataaatgtttcctgggtttgctctttgacaataaatggagaaggaaggtcacccaactccattgggccactcccctccttcccctattgaagctcctcaaaaggctacagtaatatcttgatacaacagattctcttctttcccgcctctctcctttccggcgcaacttccagagtggtgggagacggcaatctttacatttccctcatctttcttacttcagagttagcaaacaacaagttgaatggcaacttgacatttttgcatcaccatctgcctcataggccactctttcctttccctctgcccaccaagtcctcatatctgcagagaacccattgatcaccttgtgccctcttttggggcagcctgttgaaactgaagcacagtctgaccactcacgataaagcagatttttctctgcctctgccacaaggtttcagagtagtgtagtccaagtagagggtggggcacccttttctcgccgcaagaagcccattcctatggaagtctagcaaagcaatacgactcagcccagcactctctgccccaggactcatggctctgctgtgccttccatcctgggctcccttctctcctgtgaccttaagaactttgtctggtggctttgctggaacattgtcactgttttcactgtcatgcagggagcccagcactgtggccaggatggcagagacttccttgtcatcatggagaagtgccagcaggggactgggaaaagcactctacccagacctcacctcccttcctccttttgcccatgaacaagatgcagtggccctaggggttccactagtgtctgctttcctttattattgcactgtgtgaggtttttttgtaaatccttgtattcctattttttttaaagaaaaaaaaaaaaccttaagctgcatttgttactgaaatgattaatgcactgatgggtcctgaattcaccttgagaaagacccaaaggccagtcagggggtggggggaactcagctaaatagacctagttactgccctgctaggccatgctgtactgtgagcccctcctcactctctaccaaccctaaaccctgaggacaggggaggaacccacagcttccttctcctgccagctgcagatggtttgccttgcctttccaccccctaattgtcaaccacaaaaatgagaaattcctcttctagctcagccttgagtccattgccaaattttcagcacacctgccagcaacttgggggaataagcgaaggtttccctacaagagggaaagaaggcaaaaacggcacagctatctccaaacacatctgagttcatttcaaaagtgaccaagggaatctccgcacaaaagtgcagattgaggaattgtgatgggtcattcccaagaatcccccaa

SEQ ID NO: 473 - DNA, 5166 bp, Homo sapiens
atgctctcagcaacccccctgtatgggaacgttcacagctggatgaacagcgagagggtccgcatgtgtggggcgagcgaagacaggaaaatccttgtaaatgatggtgacgcttcaaaagccagactggaactgagggaagagaatcccttgaaccacaacgtggtggatgcgagcacggcccataggatcgatggcctggcagcactgagcatggaccgcactggcctgatccgggaagggctgcgggtcccgggaaacatcgtctattctagcttgtgtggactgggctcagagaaaggtcgggaggctgccacaagcactctaggtggccttgggttttcttcggaaagaaatccagagatgcagttcaaaccgaatacacccgagacagtggaggcttctgccgtctctggaaaacccccaaatggcttcagtgctatatacaaaacaccgcctggaatacaaaaaagtgctgtagccacagcagaagcgctgggcttggacaggcctgccagcgacaaacagagccctctcaacatcaatggtgctagttatctgcggctgccctgggtcaatccttacatggagggtgccacgccagccatctaccctttcctcgactcgccaaataagtattcactgaacatgtacaaggccttgctacctcagcagtcctacagcttggcccagccgctgtattctccagtctgcaccaatggggagcgctttctctacctgccgccacctcactacgtcggtccccacatcccatcgtccttggcatcacccatgaggctctcgacaccttcggcctccccagccatcccgcctctcgtccattgcgcagacaaaagcctcccgtggaagatgggcgtcagccctgggaatcctgttgattcccacgcctatcctcacatccagaacagtaagcagcccagggttccctctgccaaggcggtcaccagtggcctgccgggggacacagctctcctgttgcccccctcgcctcggccgtcaccccgagtccaccttcccacccagcctgctgcagacacctactcggagttccacaagcactatgccaggatctccacctctccttcagttgccctgtcaaagccatacatgacagttagcagcgagttccccgcggccaggctctccaatggcaagtatcccaaggctccggaagggggcgaaggtgcccagccagtgcccgggcatgcccggaagacagcggttcaagacagaaaagatggcagctcacctcctctgttggagaagcagaccgttaccaaagacgtcacagataagccactagacttgtcttctaaagtggtggatgtagatgcttccaaagctgaccacatgaaaaagatggctcccacggtcctggttcacagcagggctggaagtggcttagtgctctccggaagtgagattccgaaagaaacactatctcctccaggaaatggttgtgctatctatagatctgaaatcatcagcactgctccctcatcctgggtggtgcccgggccaagtcctaacgaagagaacaatggcaaaagcatgtcgctgaaaaacaaggcattggactgggcgataccacagcagcggagttcatcatgcccgcgcatgggcggcaccgatgctgtcatcactaacgtttcagggtcagtgtcgagtgcaggccgcccagcctccgcatcacccgcccccaatgccaatgcagatggcaccaaaaccagcaggagctctgtagaaaccacaccatccgttattcagcacgtgggccagcccccggccactcctgccaagcacagtagcagcaccagcagcaagggcgccaaagccagcaacccagaaccgagtttcaaagcaaacgagaacggccttccaccaagctctatatttctgtctccaaatgaggcattcaggtccccaccaattccctaccccaggagttacctcccttacccagcccctgagggcattgctgtaagtcccctctccttacatggcaaaggacctgtctaccctcacccagttttgttacccaatggcagtctgtttcctgggcaccttgccccaaagcctgggctgccctatgggcttcccaccggccgtccagagtttgtgacctaccaagatgccctggggttgggcatggtgcatcccatgttgataccacacacgcccatagagattactaaagaggagaaaccagagaggagatcccggtcccatgagagagcccgttacgaggacccaaccctccggaatcggttttccgagattttggaaactagcagcaccaagttacatccagatgtccccaccgacaagaacctaaagccgaaccccaactggaatcaagggaagactgttgtcaaaagcgacaagcttgtctacgtagaccttctccgagaagaaccagatgctaaaactgacacaaacgtgtccaaacccagctttgcagcagagagtgttggccagagcgctgagccccccaagccctcagttgagccggccctgcagcagcaccgtgatttcatcgccctgagagaggagttggggcgcatcagtgacttccacgaaacttatactttcaaacagccagtcttcaccgtaagcaaggacagtgttctggcaggtaccaacaaagagaacctagggttgccagtctcgactccattcctggagccacctctggggagcgatggccctgctgtaacttttggtaaaacccaagaggatcccaaaccattttgtgtgggcagtgccccaccaagtgtggatgtgacccccacctataccaaagatggagctgatgaggctgaatcaaatgatggcaaagttctgaaaccgaagccatctaagctggcaaagagaatcgccaactcagcgggttacgtgggtgaccgattcaaatgtgtcactaccgaactgtatgcagattccagtcagctcagccgggagcaacgggcattgcagatggaaggattacaagaggacagtattttatgtctacccgctgcttactgtgagcgtgcaatgatgcgcttctcagagttggagatgaaagaaagagaaggtggccacccagcaaccaaagactccgagatgtgcaaattcagcccagccgactgggaaaggttgaaaggaaatcaggacaaaaagccaaagtcggtcaccctggaggaggccattgcagaacagaacgaaagtgagagatgcgagtatagtgttggaaacaagcaccgtgatccctttgaagccccagaggacaaagatcttcctgtggagaagtactttgtggagaggcagcctgtgagcgagcctcccgcagaccaggtggcctcggacatgcctcacagccccaccctccgggtggacaggaaacgcaaagtctcaggtgacagcagccacactgagaccactgcggaggaggtgccagaggaccctctgctgaaagccaaacgccgacgagtctctaaagggctccatcctaaaaaacaacgccacttgctgcaccttagagaacgatgggagcagcaggtgtcggcagcagatggcaaacctggccggcaaagcaggaaggaagtgacccaggccactcagcctgaggccattcctcaggggactaacatcactgaagagaaacctggcaggaaaagggcagaggccaaaggcaacagaagctggtcggaagagtctcttaaacccagtgacaatgaacaaggcttgcctgtgttctccggctctccgcccatgaagagtctttcatccaccagtgcaggcggcaaaaagcaggctcagccaagctgcgcaccagcctccaggccgcctgccaaacagcagaaaattaaagaaaaccagaagacagatgtgctgtgtgcagacgaagaagaggattgccaggctgcctccctgctgcagaaatacaccgacaacagcgagaagccatccgggaagagactgtgcaaaaccaaacacttgatccctcaggagtccaggcggggattgccactgacaggggaatactacgtggagaatgccgatggcaaggtgactgtccggagattcagaaagcggccggagcccagttcggactatgatctgtcaccagccaagcaggagccaaagcccttcgaccgcttgcagcaactgctaccagcctcccagtccacacagctgccatgctcaagttcccctcaggagaccacccagtctcgccctatgccgccggaagcacggagacttattgtcaataagaacgctggcgagacccttctgcagcgggcagccaggcttggctatgaggaagtggtcctgtactgcttagagaacaagatttgtgatgtaaatcatcgggacaacgcaggttactgcgccctgcatgaagcttgtgctaggggctggctcaacattgtgcgacacctccttgaatatggcgctgatgtcaactgtagtgcccaggatggaaccaggcctctgcacgatgctgttgagaacgatcacttggaaattgtccgactacttctctcttatggtgctgaccccaccttggctacgtactcaggtagaaccatcatgaaaatgacccacagtgaacttatggaaaagttcttaacagattatttaaatgacctccagggtcgcaatgatgatgacgccagtggcacttgggacttctatggcagctctgtttgtgaaccagatgatgaaagtggctatgatgttttagccaaccccccaggaccagaagaccaggatgatgatgacgatgcctatagcgatgtgtttgaatttgaattttcagagacccccctcttaccgtgttataacatccaagtatctgtggctcaggggccacgaaactggctactgctttcggatgtccttaagaaattgaaaatgtcctcccgcatatttcgctgcaattttccaaacgtggaaattgtcaccattgcagaggcagaattttatcggcaggtttctgcaagtctcttgttctcttgctccaaagacctggaagccttcaaccctgaaagtaaggagctgttagatctggtggaattcacgaacgaaattcagactctgctgggctcctctgtagagtggctccaccccagtgatctggcctcagacaactactggtga

SEQ ID NO: 474 - DNA, 1503 bp, Homo sapiens
atgcgaggcgagctctggctcctggtgctggtgctcagggaggctgcccgggcgctgagcccccagcccggagcaggtcacgatgagggcccaggctctggatgggctgccaaagggaccgtgcggggctggaaccggagagcccgagagagccctgggcatgtgtcagagccggacaggacccagctgagccaggacctgggtgggggcaccctggccatggacacgctgccagataacaggaccagggtggtggaggacaaccacagctattatgtgtcccgtctctatggccccagcgagccccacagccgggaactgtgggtagatgtggccgaggccaaccggagccaagtgaagatccacacaatactctccaacacccaccggcaggcttcgagagtggtcttgtcctttgatttccctttctacgggcatcctctgcggcagatcaccatagcaactggaggcttcatcttcatgggggacgtgatccatcggatgctcacagctactcagtatgtggcgcccctgatggccaacttcaaccctggctactccgacaactccacagttgtttactttgacaatgggacagtctttgtggttcagtgggaccacgtttatctccaaggctgggaagacaagggcagtttcaccttccaggcagctctgcaccatgacggccgcattgtctttgcctataaagagatccctatgtctgtcccggaaatcagctcctcccagcatcctgtcaaaaccggcctatcggatgccttcatgattctcaatccatccccggatgtgccagaatctcggcgaaggagcatctttgaatatcaccgcatagagctggaccccagcaaggtcaccagcatgtcggccgtggagttcaccccattgccgacctgcctgcagcataggagctgtgacgcctgcatgtcctcagacctgaccttcaactgcagctggtgccatgtcctccagagatgctccagtggctttgaccgctatcgccaggagtggatggactatggctgtgcacaggaggcagagggcaggatgtgcgaggacttccaggatgaggaccacgactcagcctcccctgacacttccttcagcccctatgatggagacctcaccactacctcctcctccctcttcatcgacagcctcaccacagaagatgacaccaagttgaatccctatgcaggaggagacggccttcagaacaacctgtcccccaagacaaagggcactcctgtgcacctgggcaccatcgtgggcatcgtgctggcagtcctcctcgtggcggccatcatcctggctggaatttacatcaatggccaccccacatccaatgctgcgctcttcttcatcgagcgtagacctcaccactggccagccatgaagtttcgcagccaccctgaccattccacctatgcggaggtggagccctcgggccatgagaaggagggcttcatggaggctgagcagtgctga

SEQ ID NO: 475 - DNA, 1623 bp, Homo sapiens
atggctctaacgcggccggtgcggctcttttccctcgtgactcggttgctcctggcgccgcgacggggcctcacggtccgcagtcccgacgaacccctgccggtggtgcgcatcccagtggctctacagcggcagttggaacagcggcagagcaggcggcggaacctcccgaggccggtgctggttcgacccggaccgctgctggtttcggcgcggcggccggagttgaaccagccggcgcgcctcacactgggccgttgggagcgcgcgccgctagcctctcaaggctggaagagtcgacgcgcgcgtcgggaccacttctccatcgagcgcgcgcaacaggaggcgccagcggtgcgaaagctctcgtctaagggcagctttgctgacctgggcctggagccccgtgtgctgcacgcactacaggaggctgcgcctgaagtcgttcagcccacaaccgtgcagtctagcaccatcccctcactacttcgcggccgccatgtcgtttgcgccgcagaaaccggcagtggcaagactctcagctacctcctgccgctgcttcaacggctcttgggccagccaagcctggactcccttcctatccccgcgccccgaggcctggtccttgttccttcccgagaattggcccaacaggtgcgggctgtggcccaacccttgggccgctccttgggcctgctggtgcgggacctggagggaggccacggcatgcgtaggatcaggctgcagctgtccagacagccttcagcagatgtgcttgtggccactccaggggctctgtggaaggccctgaaaagtcgactgatcagtctggagcaactctccttcttggtgttggatgaggcagacacactgctggatgaaagcttcctggaactggtggactacatcttagagaagagccacatagcagaaggcccagctgacttggaagaccccttcaatcccaaagctcagttagtgctggtaggagccacatttcccgaaggtgtaggccagttgctgaataaagtcgccagcccagatgctgtcaccaccatcaccagctccaagctccactgtatcatgcctcatgtgaaacagacatttctgagactgaagggagcagataaggtggccgagctggtgcacatcctcaagcatcgtgacagagcagaaaggactggtccctcaggaactgttctggtgttctgtaatagctccagcactgtgaactggctgggatatattctggatgaccacaaaatccaacacctaaggttgcaggggcaaatgccagccttgatgagggtaggaatcttccagtccttccagaagagctcccgagacatacttctctgcacagacatagcctctcggggcctggacagcactggtgtggagctggttgtcaattatgatttccccccaacgctgcaagattacatccacagagcagggagagtgggccgtgtggggagcgaggtgccaggcaccgtcatcagttttgtgacccatccctgggatgtgagcctggttcagaagattgagctggcggctcgccgaaggagaagtcttccaggactagcatcctcggtgaaagagcctttgccccaagcaacctga

SEQ ID NO: 476 - DNA, 915 bp, Homo sapiens
gcatcctccgcatccacatccgcatcgtcgtcctccccgaccgcgtcctgcagcagctgccagtggagccgcctgacaagggactgccatccaccatggtgaagctgggctgcagcttctctgggaagccaggtaaagaccctggggaccaggatggggctgccatggacagtgtgcctctgatcagccccttggacatcagccagctccagccgccactccctgaccaggtggtcatcaagacacagacagaataccagctgtcctccccagaccagcagaatttccctgacctggagggccagaggctgaactgcagccacccagaggaagggcgcaggctgcccaccgcacggatgatcgccttcgccatggcgctactgggctgcgtgctgatcatgtacaaggccatctggtacgaccagttcacctgccccgacggcttcctgctgcggcacaagatctgcacgccgctgaccctggagatgtactacacggagatggaccccgagcgccaccgcagcatcctggcggccatcggggcctacccgctgagccgcaagcacggcacggagacgccggcggcctggggggacggctaccgcgcagccaaggaggagcgcaaggggcccacccaggctggggcggcggcggcggccaccgaaccccccgggaagccgtcggccaaggcggagaaggaggcggcgcggaaggcggccgggagcgcggcgcccccgcccgcgcagtgacgtctccagccccgcagcccggcccgggcgtcctccgccagctcctgtgaccagcgcgtctcccgatgctctccgccgtgttcgtgtccccaggcgccctcgctgcagccccgcccccgtgggtctctgactctgtcgcttttctctaagtaaagatttcacgtcc

SEQ ID NO: 477 - DNA, 393 bp, Homo sapiens
tttttttttttctaagccacaaagcttggcatattgagagaattagaaagaaaggtgaagacatcggctatttccttagccttgtgcaaacattcaaagtcatgacaaccagaggtagcagcatgacatagctaatttttttgtgctccttacttacagctttggaggccaatccattaggaaagcagccaatttgaacacttcttagtccacaattttctcctgcttcccatagcacaactgtgttgtatattgctgtgttgcaatattaagaatggtcttattttgccttattttgaatgtctatatgtgcacataacatgatttatgtcagtgttagccttgtgtttttctatagcaataaagattgctttagttaaatctcctcgtgcc

SEQ ID NO: 478 - DNA, 1807 bp, Homo sapiens
ataaggccacctccgcaggccaggacaacccagaagcaaaagagcagagctaccatgtcctcttggagcagacagcgaccaaaaagggtgaccctgtttgcagcacgatgtctgaagaagaggcggctcagatccccagatccagtgtgtgggagcaggaccagcagaacgtggtgcagcgtgtggtggctctgcccctggtcagggccacgtgcaccgcggtctgcgatgtttacagtgcagccaaggacaggcacccgctgctgggctccgcctgccgcctggctgagaactgcgtgtgcggcctgaccacccgtgccctggaccacgcccagccgctgctcgagcacctgcagccccagctggccactatgaacagcctcgcctgcaggggcctggacaagctggaagagaagcttccctttctccagcaaccttcggagacggtaccccggacgactagacatggggacctccagtgggggcaggccagattagaggcgggagggagggagggatggtgacaaccaggcttttagttaactcaagaaaaaacagccaggttaagataactgcaacgtgtgtgtgtgtgtgtgtgtgtgtgtgtgtgtgtgtgtgtgtgtatacatatatgtatatacgtatagtgtatatatgtatatatacgtataagtatatatgtatatatacgtatgagtatatatgtatatgtgtatatatacatgtatatatgtatatgtgtgtatatgtgtatatatgtatatgtatgtgtgtatacatatgtattgctagtaagggcagttaactccctcaacaccctctgtgagggaagggttttatcacccattttataggggaaactgaggcacggagccaggtagaagtccagggatctttgagtcccagccccagggaactagggtggcagaaatggagctggagtcccacggtgcctggagtgggggggcccttccttccaggtggtgacctcagccaaggacgtggtggccagcagtgtcacgggtgtggtggacctggcccggaggggccggcgctggagcgtggagctgaagcgctccgtgagccatgctgtggatgttgtactggaaaaatcagaggagctggtggatcacttcctgcccatgacggaggaagagctcggtgaggacgacaccctcaaccctaacccctgagtcctgccccgtccccatcccctgtggtacagatcagagaggtctgagactcacccaaggtcacacagcagatcagcaggaaacatacaactcaaaaccaggcctgtcctccctcccggtcacttccacggcccctcaacctgcatcccgccaggagtcagaacacccagaccctaagggcatatagggcttttagacttgaggtcccaaactggtggcccccaaatgcctgtgcagcgtgttttaaatattttcattctttgcatgcatttaacaaccagattttgcattacatgtcccgattcttggcttgttttgaaaaaccagacacactgccaggcacagtggctcacgcctgtaatctcagcactttgggaggccaaggtgggcagatcatgaggtcaggagttcgagcccagcctggccaacatagtgaaatcccgtctctactaaaaatacagaaaattggccaggcgtggtggcgtgtgcctgtattcccagatgctcgggaggctgaggcaggagaatcgcttgaacctgggaggtggaggttgcaatgagctgagatcgcgctattgcactccagcccaggccacagtgcgagactccgtttc

SEQ ID NO: 479 - DNA, 1980 bp, Homo sapiens
gggaaggcgggacaggggaggcccaccctccttgggctccgctagcgaccagccagcgccccttcagacgcagccttcctggctccggaccccggctttctgctccggtcctcgtcccaatgccccccaaggtccccagcagaggcattcaggttcctcctcgccccgcccagacgcagcttctttgggtatgggtgacagcactcctgagcgtcgctgtccctattcgctgccgttgccagctccgattccgcgaaacctctccggcaccacctcggaagccccgcccagggcgatggtccgggcctaacctgccggccccgcccacccggcccttgggctccctgaggcccgcccagcagacaccggagagcaatggtgtgatctccgcacactgcaacctctgcctccagggttcaagtggttctcctgcctcagcctcccaagcagatgggactacaggtactggtagttaactctcaaggagaaatttcacggttgagcaccgaaaagaaagtggtcatgaaaggaagtatcaacaattatcttaaattgggtcaagaagggaagtatcgcgtctaccacaatcaatactccactaattcatttgctttgaataagcaccagcacagagaagaccatgataagagaaggcatcttgcacataagttctgtctgactccagcaggagagttcaaatggaacggttctgtccatgggtccaaagttcttaccatatctactctgagactgactatcacccaattagaaaacaacatcccttcatcctttcttcatcccaaccgggcatcacatagggcaaactggatcaaggcagttcagatgtgtagcaaactcagagaatttgcattggctttagccattttggagtgtgcagttaaaccagttgtgatgctaccaatatggcgagaatctttaggacataccagctttctccctttgtctcataaccatgtccaccaatgagaatgctaatacacaagctgcccatcttcacagatctaagaacaagggaaaggacagtacagaaacgaggcgtcacagaatagaggtcaatgtggagctgaggaaagctaagaaggatgaccagatgctgaagaggagaaatgtaagctcatttcctgatgatgctacttctccgctgcaggaaaactgcaacaaccagactcctgccctaagagccatagggaatatcgtcactggtacagatgaacagactcaggttgtgattgatgcaggagcactcgccgtctttcccagcctgctcaccaaccccaaaactaacattcagaaggaagctacgtggacaatgtcaaacatcacagccagccgccaggaccagatacagcaagttgtgaatcatggattagtcccattccttgtcagcgatctctctaagattttgagacacaaaaggaagctgtatgggccgtggaacagttgaacagattgtgtaccttgttcactgtggcataatagaaccgttgatgaacctcttacctgcaaaagataccaagattattctggttatcctggatgccatttcaaatatctttcaggctgctgagaaactaggtgaaactgagaaacttagtataatgattgaagaatgtggaggcgtagacaaaattgaagctctacaaaaccatgaaaatgagtctgtatataaggcttcattaagcttaactgagaagtatttctctgtagaggtgagtaatggatggtaatattaataacaacttggaaaaatgtaaagccaaggccatgagcccttttttccctcatacttttaaaaatgagcctcatatctttgttaaatatagtaaaatatcagtgtgcataggacgtaatgtacttattgcccctctgatgtttggcttgatggtaataaaatctatttatttatttatttagctttggtttctacaaattattttattagaatgtcagactcaaaag

SEQ ID NO: 480 - DNA, 2208 bp, Homo sapiens
atgactccggaattgatgataaaagcctgtagcttttatactggacatttagtaaagactcatttttgcacttggagagacatagctcgtacaaatgaaaatgtcgtcctggctgaaaaaatgaacagagcagtgacatgctacaatttcagacttcaaaaatctgtatttcatcactggcactcttatatggaagaccagaaagaaaaacttaaaaatattctattgcggatacaacagatcatctattgtcacaagctaaccattatcctaacaaaatggcggaatacagcaagacataagagtaaaaagaaagaagatgagctgatattaaaacatgaacttcaattgaaaaaatggaaaaataggttaatactcaaaagagctgctgcagaagaatccaattttcctgaacgaagttcttctgaagtctttcttgtagatgagactctaaaatgtgacatttcactgttacctgaaagagcaatattacagattttcttctacctcagtttaaaagatgtgataatatgtggtcaagttaatcatgcctggatgttgatgacacaactaaactcactgtggaatgctattgatttttcctcagtgaaaaatgtgattccagataaatatatagtgtctactttgcaaaggtggcgtttaaatgtgctgcgtttgaattttcgtggttgtcttctccgacccaaaactttcagatctgtcagccactgtaggaacttgcaagagttgaatgtctctgactgcccaacattcacagatgaatcaatgagacacatttctgagggctgcccgggggtcctgtgtctcaatctgtctaacacaactatcaccaacaggacgatgcgactcctgccgaggcacttccacaacttacagaatcttagtttggcttattgcagacggttcacagacaaaggcttacagtacctgaacttggggaatggatgccacaagctcatctatctggacctctctggctgcacccagatttcagtccaaggcttcaggtacattgcaaacagctgcactggaattatgcatcttaccattaatgacatgccaactctgacggacaactgtgtaaaagctttagttgaaaaatgctctcgtattacatcgctggttttcactggtgcaccgcatatctccgattgtactttcagagctctttctgcttgtaaactcagaaagatccgatttgaaggaaataaaagggttactgatgcatccttcaaatttatagacaagaattatccaaatctcagtcacatttatatggctgactgcaagggaataacagacagcagcctcagatccctttcacctttgaagcaactgactgtgttgaatttggcaaattgtgtaagaattggtgatatgggactaaagcaatttcttgatggtcctgcaagcatgaggataagagagctaaatttaagcaactgtgtgcggctaagtgatgcctctgttatgaaactatctgagcgctgccctaatttaaactacttgagtttacgaaattgtgaacatttgactgcccaaggaattggatatattgtaaacatcttttccttggtatcaatagatctctctggaacagacatctctaatgagggtttgaatgtgctttccagacataaaaaattgaaggaactttctgtatctgaatgttatagaatcactgatgatggaattcaggcattctgcaaaagctcactgatcttggaacatttggatgtctcttattgctcccagctgtcagatatgattatcaaagcactggccatttactgcattaacctcacatctctcagcattgctggctgtccaaagattactgactcagcaatggagatgttatcggcaaaatgccattacctgcacattttggatatctctggttgtgtcttgcttactgaccaaatccttgaggaccttcagataggctgcaaacaactccggatccttaagatgcaatactgcacaaatatttccaagaaggcagctcaaagaatgtcatctaaagttcagcagcaggaatacaacactaatgaccctccacgttggtttggctatgatagggaaggaaaccctgttacagagcttgacaacataacatcatctaaaggagccttagaattaacagtgaaaaagtcaacatacagcagtgaagaccaagcagcgtga

SEQ ID NO: 481 - DNA, 2289 bp, Homo sapiens
atggcctcaaatgagagagatgctatatcgtggtaccaaaagaagattggagcctacgatcagcagatatgggaaaagtcaatcgaacagactcagattaagggtttgaaaaacaaaccgaaaaagatgggccacataaagccagacttgattgacgttgacttaatcagagggtcaacatttgccaaagcaaaacctgaaattccatggacatctctgactcggaaggggcttgttcgagttgtattttttccattgttcagcaattggtggattcaggttacctctttaagaatctttgtttggctgttactactttatttcatgcaagttatagcaattgtcttatatttgatgatgcctattgtgaacataagtgaagtacttggacccttgtgccttatgctactcatgggaactgtccactgtcaaattgtgtctactcagataacaagaccatcaggaaacaatggaaatcgaagaagaagaaaattacgaaaaactgtaaatggtgatgggagccgagaaaatggaaataactcctctgataaagtcagaggaatagaaactttggaatctgtacccattattggtggtttttgggagactatctttggcaacaggattaaaagagtaaaattaatatctaacaaagggactgaaactgacaatgacccaagttgtgtccatcctatcattaagaggagacaatgtcgaccagagattagaatgtggcaaacaagagagaaagcaaaattttcagatggagaaaagtgccgtagggaggcttttaggcgtttgggtaatggggtgtctgatgacctgtcaagtgaagaagatggtgaagcacggacacagatgatattattgcgtaggagtgtggaaggggcctcaagtgacaatggttgtgaagttaagaatagaaaatcaatactttcaaggcacctaaactctcaggtaaagaaaaccactacaaggtggtgtcatattgtgcgggattcagatagtctggctgaatcagaatttgaatcagcagccttcagccagggctctagatcgggtgtgagtggtggctctcgaagcctcaacatgtcaagaagagactcagaaagcacccgccatgactcggagactgaggacatgttatgggacgacctgctacatggcccagagtgccggtcatctgtcaccagtgacagtgagggggcccatgtgaatacccttcactcagggaccaaacgtgaccccaaagaggatgtttttcagcagaatcatttattctggcttcagaattcaagtccttcctctgatcgagttagtgcaataatctgggaggggaatgagtgcaaaaagatggatatgtctgtgttggaaataagtggcatcatcatgagcagggtcaatgcctatcagcaaggagtaggttatcagatgctgggaaatgttgtcactattggattagcattttttccattcttacatcgacttttccgtgagaagagccttgaccaactaaagtccatttcagctgaggagatcttgactctcttttgtggggcaccacctgttacacctattattgttttgtcgataattaatttttttgaaagattgtgtcttacttggatgttttttttcatgatgtgtgtggcagagagaacatataaacagagatttttatttgcaaaactcttcagccatattacttctgccaggaaagctaggaaatatgaaatacctcatttcagacttaagaaggtggagaatattaaaatatggttatcactgcgttcctatctaaagagacgggggccacagcgttcagttgatgtggttgtatcctcggttttcctactgacactttcgattgctttcatttgttgtgctcaggttctccaaggacataaaactttcctgaatgatgcttataactgggagtttttgatctgggaaacagctttactactttttttattgcgtctggcctcactggggtctgaaaccaataagaaatacagcaatgtttcaatattacttacagaacagattaatttatatcttaagatggaaaaaaagccaaataagaaagaacagcttactctagtaaacaatgtattaaagctgtccaccaagttgttgaaagagctggacacaccatttagactctatggactgacaatgaatcccttaatctacaatatcacaagagtagttatcctttctgctgtctcaggtgttataagtgatcttctaggatttaatataagactgtggaaaattaaatcataa

SEQ ID NO: 482 - DNA, 1461 bp, Homo sapiens
atgtcgtcgtcgtcgccgccggcgggggctgccagcgccgccatctcggcctcggagaaagtggacggcttcacccggaaatcggtccgcaaggcgcagaggcagaagcgctcccagggctcgtcgcagtttcgcagccagggcagccaggcagagctgcacccgctgccccagctcaaagatgccacttcaaatgaacaacaagagcttttctgtcagaagttgcagcagtgttgtatactgtttgatttcatggactctgtttcagacttgaagagcaaagaaattaaaagagcaacactgaatgaactggttgagtatgtttcaactaatcgtggtgtaattgttgaatcagcgtattctgatatagtaaaaatgatcagtgctaacatcttccgtacacttcctccaagtgataatccagattttgatccagaagaggatgaacccacgcttgaggcctcttggcctcacatacagttggtatatgaattcttcttgagatttttggagagccctgatttccagcctagcattgcaaaacgatacattgatcagaaattcgtacaacagctcctggagctttttgatagtgaagatcccagagaacgtgacttcctgaagactgttctgcaccgaatttatgggaaatttcttggattaagagcattcatcagaaaacaaattaacaacattttcctcaggtttatatatgaaacagaacatttcaatggtgttgctgaacttcttgaaatattaggaagtattatcaatggctttgcattgccactgaaagcagaacataaacaatttctaatgaaggttcttattcctatgcatactgcaaaaggattagctttgtttcatgctcagctagcatattgtgttgtacagttcctggagaaagatacaacactaacagagccagtgatcagaggactgctgaaattttggccaaaaacctgcagtcagaaagaggtgatgtttttaggagaaattgaagaaatcttagatgtcattgaaccaacacagttcaaaaaaattgaagagccacttttcaagcagatatccaagtgtgtatccagttctcattttcaggttgcagaaagggcattgtacttctggaataacgaatatattcttagtttgattgaggagaacattgataaaattctgccaattatgtttgccagtttgtacaaaatttccaaagaacactggaatccgaccattgtagcactggtatacaatgtgctgaaaaccctaatggaaatgaatggcaagcttttcgatgaccttactagctcatacaaagctgaaagacagagagagaaaaagaaggaattggaacgtgaagaattatggaaaaaattagaggagctaaagctaaagaaagctctagaaaaacagaatagtgcttacaacatgcacagtattctcagcaatacaagtgccgaataa

SEQ ID NO: 483 - DNA, 999 bp, Homo sapiens
atgccagaagggccgttggtgaggaaatttcaccatttggtctccccctttgtgggtcagcaggtggtcaagacagggggcagcagtaagaagctacagcccgccagcctgcagtctctgtggctccaggacacccaggtccatggaaagaaattattccttagatttgatctagatgaagaaatggggccccctggcagcagcccaacaccagagcctccacaaaaagaagtgcagaaggaaggggctgcggacccaaagcaggtcggggagcccagcgggcagaagacccttgatggatcctcacggtctgcagagctcgtcccccagggcgaggatgattctgagtatttggagagagacgcccctgcaggagatgctgggaggtggctgcgtgtcagctttggtttgtttggcagcgtttgggtgaacgatttctccagagccaagaaagccaacaagaggggggactggagggacccttccccgaggttggtcctgcactttggtggtggtggcttcctggcattttataattgtcagttgtcttggagctcttccccagtggtcacacccacctgtgacatcctgtctgagaagttccatcgaggacaagccttagaagctctaggccaggctcagcctgtctgctatacactgctggaccagagatacttctcagggctagggaacatcattaagaatgaagccttgtacagagctgggatccatcccctttctctcggttcagtcctgagtgcctcgcgtcgggaggtcctggtggatcacgtggtggagttcagtacagcctggctgcagggcaagttccaaggcagaccgcagcacacacaggtctaccagaaagaacagtgccctgctggccaccaggtcatgaaggaggcgtttgggcccgaagatgggttacagaggctcacctggtggtgcccgcagtgccagccccagttgtcagaggagccagagcagtgccagttctcctaa

SEQ ID NO: 484 - DNA, 726 bp, Homo sapiens
atgtttgcacgaggactgaagaggaaatgtgttggccacgaggaagacgtggagggagccctggccggcttgaagacagtgtcctcatacagcctgcagcggcagtcgctcctggacatgtctctggtgaagttgcagctttgccacatgcttgtggagcccaacctgtgccgctcagtcctcattgccaacacggtccggcagatccaagaggagatgacgcaggatgggacgtggcgcacagtggcaccccaggctgcagagcgggcgccgctcgaccgcttggtctccacggagatcctgtgccgtgcagcgtgggggcaagagggggcacatcctgctcctggcttgggggacggccacacacagggtccagtttctgacctttgcccagtcacctcagcacaggcaccaaggcacctgcagagcagcgcctgggagatggatggccctcgagaaaacagaggaagctttcacaagtcacttgatcagatatttgaaacgctggagactaaaaaccccagctgcatggaagagctgttctcagacgtggacagcccctactacgacctggacacagtactgacaggcatgatggggggtgccaggccgggcccctgcgaagggctcgagggcttggctccggccaccccaggccctagctccagctgcaagtccgacctgggcgagctggaccacgtggtggagatcctggtggagacctga
